(19) United States
(12) Patent Application Publication
(10) Pub. No.: US 2005/0282242 A1
(43) Pub. Date: Dec. 22, 2005

(54) Screening assays for antimicrobial agents

(75) Inventors: David M. Rothstein, Lexington, MA (US); Christopher K. Murphy, Upton, MA (US); Ian MacNeil, Milton, MA (US)

Correspondence Address: CLARK & ELBING LLP, 101 FEDERAL STREET, BOSTON, MA, 02110, US

(73) Assignee: ActivBiotics, Inc., Lexington, MA (US)

(21) Appl. No.: 11/115,639

(22) Filed: Apr. 27, 2005

Related U.S. Application Data
(60) Provisional application No. 60/566,858, filed on Apr. 30, 2004.
(60) Provisional application No. 60/565,679, filed on Apr. 27, 2004.

(51) Int. Cl. C12Q 1/18

(52) U.S. Cl. 435/32

(57) ABSTRACT

The present invention provides methods for screening antimicrobial agents that make use of mutated microbial polypeptides. Because these polypeptides have biological activity and result in increased antimicrobial drug resistance, candidate compounds that specifically target these polypeptides provide therapeutics or therapeutic lead compounds for treating infections caused by drug resistant microbial pathogens.

### CROSS REFERENCE TO RELATED APPLICATIONS

[0001] This application claims benefit from U.S. Provisional Application Nos. 60/565,679 (filed Apr. 27, 2004) and 60/566,858 (filed Apr. 30, 2004), each of which is hereby incorporated by reference.

### FIELD OF THE INVENTION

[0002] The field of the invention relates to drug discovery.

### BACKGROUND OF THE INVENTION

[0003] In spite of advances in molecular biology and microbiology, a major difficulty in eradicating infections caused by microbial pathogens is the propensity of such pathogens to rapidly adapt to new environmental challenges and escape the harmful effects of drug therapy. The predominant mechanism of drug resistance is typically caused by mutations in the gene that encodes the protein targeted by the antimicrobial agent. Because these drug resistance-conferring mutations are endogenous (i.e., they require no transfer of DNA from another species), the potential for resistance exists in any sub-population within an infectious population in which the bacterial population number exceeds the mutation frequency.

[0004] Rifamycins are a family of chemicals that exhibit potent inhibitory activities against Gram-positive bacteria. Despite their efficacy, the administration of such antibacterial agents may still result in the development of drug resistance, most likely as a result of a mutation in the gene encoding the β subunit of RNA polymerase (RpoB), which contains the rifampin-binding site as defined by X-ray crystal structure (Campbell et al., Cell 104:901-912, 2001).

[0005] Due to the constant emergence of drug-resistant microbial strains for the rifamycins and other antibiotics, new antimicrobial agents that are effective against such drug-resistant strains are desirable.

### SUMMARY OF THE INVENTION

[0006] In general, the present invention features methods of identifying compounds that inhibit the growth of drug-resistant microbial pathogens. This invention is based on our discovery that antibiotics that specifically target drug resistant bacterial species can be identified using screening methods that employ drug resistance-conferring polypeptides. We show, for example, that rifampin derivatives that specifically target rifampin-resistant bacteria can be identified using screening assays that identify compounds that target the mutated β subunit of RNA polymerase. Accordingly, antimicrobial agents that inhibit the growth of drug-resistant pathogens are identified on the basis of their ability to bind and/or decrease the biological activity or expression level of drug resistance-conferring microbial polypeptides. Our results further show that screening methods that make use of a plurality of drug resistance-conferring polypeptides allow for the identification of antimicrobial agents associated with an improved ability to specifically and effectively inhibit the growth of drug-resistant microbial pathogens.

[0007] According to this invention, a compound that inhibits the growth of drug resistant microbial pathogens may be identified by a method involving the steps of: (a) producing a derivative compound of an antimicrobial compound; (b) contacting the derivative compound with a plurality of mutated microbial polypeptides conferring drug resistance, under conditions that ensure that each contacting event is segregated from the others; and (c) determining whether the derivative compound interacts with the mutated microbial polypeptides. A derivative compound that interacts with at least two different mutated microbial polypeptides is identified as a compound that inhibits the growth of drug resistant microbial pathogens. In one example, a compound having weak antimicrobial activity may be used as a lead compound for the design of improved antimicrobial agents. Derivative compounds are produced using information provided by the lead compound and these derivative compounds are screened for their antimicrobial activity. Using the methods of the invention, compounds having increased antimicrobial activity (e.g., at least 10%, 20%, 30%, 40%, 50%, 60%, 70%, 80%, 90%, or 100%) relative to the lead compound and having the ability to reduce the growth of drug resistant microbial pathogens may be identified.

[0008] The invention also features a method of identifying a compound that inhibits the growth of drug resistant microbial pathogens, involving the steps of: (a) contacting at least 10, 20, 30, 40, 50, 60, 80, 100, or more than 100 candidate compounds with a plurality of mutated microbial polypeptides conferring drug resistance, under conditions that ensure that each contacting event is segregated from the others; and (b) determining whether the candidate compounds interact with the mutated microbial polypeptides. A candidate compound that interacts with at least two different mutated microbial polypeptides is identified as a compound that inhibits the growth of drug resistant microbial pathogens.

[0009] Alternatively, the invention features a method of identifying a compound that inhibits the growth of drug resistant microbial pathogens, involving the steps of: (a) contacting a candidate compound with a plurality of mutated microbial polypeptides conferring drug resistance under conditions that ensure that each contacting event is segregated from the others; and (b) determining whether the candidate compound binds the mutated microbial polypeptides. A candidate compound that binds at least two different mutated microbial polypeptides is identified as a compound that inhibits the growth of drug resistant microbial pathogens.

[0010] Alternatively, the invention features a method of identifying a compound that inhibits the growth of drug resistant microbial pathogens, involving the steps of: (a) contacting a candidate compound with a plurality of mutated microbial polypeptides conferring drug resistance under conditions that ensure that each contacting event is segregated from the others; and (b) determining in vitro whether the candidate compound reduces the biological activity of the mutated microbial polypeptides. A candidate compound that reduces the biological activity of at least two different mutated microbial polypeptides is identified as a compound that inhibits the growth of drug resistant microbial pathogens.

[0011] A compound that inhibits the growth of drug resistant microbial pathogens may also be identified using a method involving the steps of: (a) contacting a candidate compound with a mutated microbial polypeptide conferring drug resistance in vitro; (b) determining whether the candidate compound interacts with the mutated microbial polypeptide, and continuing to step (c) if the candidate compound interacts with the mutated microbial polypeptides; (c) contacting the candidate compound with a mutated microbial polypeptide in an animal; and (d) determining whether the candidate compound interacts with the mutated microbial polypeptide in the animal. A candidate compound that interacts with the mutated microbial polypeptide in the animal is identified as a compound that inhibits the growth of drug resistant microbial pathogens.

[0012] The invention also features a method of identifying a compound that inhibits the growth of drug resistant microbial pathogens, involving the steps of: (a) contacting a candidate compound with a mutated microbial polypeptide conferring drug resistance; (b) determining whether the candidate compound interacts with the mutated microbial polypeptide, and continuing to step (c) if the candidate compound interacts with the mutated microbial polypeptide; (c) contacting the candidate compound with a plurality of mutated microbial polypeptides conferring drug resistance under conditions that ensure that each contacting event is segregated from the others; and (d) determining whether the candidate compound interacts with the mutated microbial polypeptides, such that a candidate compound that interacts with at least two different mutated microbial polypeptides is identified as a compound that inhibits the growth of drug resistant microbial pathogens.

[0013] For each of the above methods, a candidate compound is identified as a compound that inhibits the growth of drug resistant microbial pathogens if it interacts, binds, or reduces the biological activity of at least two, three, four, five, six, ten, twenty, or more than twenty mutated microbial polypeptides. If desired, the mutated microbial polypeptide may be operably linked to a reporter gene in any of the methods of the invention. A candidate compound may therefore be identified as a useful compound to inhibit the growth of drug resistant pathogens based on its ability to reduce expression of the reporter gene. Furthermore, the contacting event between a candidate compound and a mutated microbial polypeptide may occur inside a cell (e.g., microbial cell) or in a cell-free environment. The contacting event may therefore occur in an intracellular pathogen such as an obligate intracellular pathogen or a facultative intracellular pathogen. If an intracellular pathogen is employed in the present methods, the host of the pathogen may also be present. Obligate intracellular pathogens include bacteria, protozoans, and fungi. Obligate intracellular bacteria include, for example, Anaplasma bovis, A. caudatum, A. centrale, A. marginale A. ovis, A. phagocytophila, A. platys, Bartonella bacilliformis, B. clarridgeiae, B. elizabethae, B. henselae, B. henselae phage, B. quintana, B. taylorii, B. vinsonii, Borrelia afzelii, B. andersonii, B. anserina, B. bissettii, B. burgdorferi, B. crocidurae, B. garinii, B. hermsii, B. japonica, B. miyamotoi, B. parkeri, B. recurrentis, B. turdi, B. turicatae, B. valaisiana, Brucella abortus, B. melitensis, Chlamydia pneumoniae, C. psittaci, C. trachomatis, Cowdria ruminantium, Coxiella burnetii, Ehrlichia canis, E. chaffeensis, E. equi, E. ewingii, E. muris, E. phagocytophila, E. platys, E. risticii, E. ruminantium, E. sennetsu, Haemobartonella canis, H. felis, H. muris, Mycoplasma arthriditis, M. buccale, M. faucium, M. fermentans, M. genitalium, M. hominis, M. laidlawii, M. lipophilum, M. orale, M. penetrans, M. pirum, M. pneumoniae, M. salivarium, M. spermatophilum, Rickettsia australis, R. conorii, R. felis, R. helvetica, R. japonica, R. massiliae, R. montanensis, R. peacockii, R. prowazekii, R. rhipicephali, R. rickettsii, R. sibirica, and R. typhi. Exemplary intracellular protozoans are Brachiola vesicularum, B. connori, Encephalitozoon cuniculi, E. hellem, E. intestinalis, Enterocytozoon bieneusi, Leishmania aethiopica, L. amazonensis, L. braziliensis, L. chagasi, L. donovani, L. donovani chagasi, L. donovani donovani, L. donovani infantum, L. enriettii, L. guyanensis, L. infantum, L. major, L. mexicana, L. panamensis, L. peruviana, L. pifanoi, L. tarentolae, L. tropica, Microsporidium ceylonensis, M. africanum, Nosema connori, Nosema ocularum, N. algerae, Plasmodium berghei, P. brasilianum, P. chabaudi, P. chabaudi adami, P. chabaudi chabaudi, P. cynomolgi, P. falciparum, P. fragile, P. gallinaceum, P. knowlesi, P. lophurae, P. malariae, P. ovale, P. reichenowi, P. simiovale, P. simium, P. vinckeipetteri, P. vinckei vinckei, P. vivax, P. yoelii, P. yoelii nigeriensis, P. yoelii yoelii, Pleistophora anguillarum, P. hippoglossoideos, P. mirandellae, P. ovariae, P. typicalis, Septata intestinalis, Toxoplasma gondii, Trachipleistophora hominis, T. anthropophthera, Vittaforma corneae, Trypanosoma avium, T. brucei, T. brucei brucei, T. brucei gambiense, T. brucei rhodesiense, T. cobitis, T. congolense, T. cruzi, T. cyclops, T. equiperdum, T. evansi, T. dionisii, T godfreyi, T. grayi, T. lewisi, T. mega, T. microti, T. pestanai, T. rangeli, T. rotatorium, T. simiae, T. theileri, T. varani, T. vespertilionis, and T. vivax. Furthermore, exemplary obligate intracellular fungi are Histoplasma capsulatum or a species of the genus Candida. If desired, the contacting event may occur in vivo. Accordingly, an animal having an infection with microbial pathogens that express mutated polypeptides conferring drug resistance may be treated with a candidate compound.

[0014] Interactions between the candidate compound and the mutated microbial polypeptide conferring drug resistance may be determined by any standard method known in the art including, for example, the determination of microbial cell growth, biological activity of the mutated microbial polypeptide, or binding between the candidate compound and the mutated microbial polypeptide. If the contacting event occurs in vivo (i.e. by application of the candidate compound on or in the animal by any route of administration (e.g., topical, oral, dermal, sub-cutaneous, intraperitoneal, and intravenous administration)), interaction between the candidate compound and the mutated microbial polypeptide may be determined using any standard method known in the art, including for example, survival assays or assays that detect microbial load (e.g., bacterial load in a biological sample from the animal). Thus, a useful candidate compound reduces the number of microbial pathogens in said animal (by at least 10%, 20%, 30%, 40%, 50%, 60%, 70%, 80%, 90% or 100% relative to an untreated control), increases the survival of the animal (by at least 10%, 20%, 30%, 40%, 50%, 60%, 70%, 80%, 90% or 100% relative to an untreated control), or both. Exemplary methods for each of these methods are provided herein. Others are well known in the art.

[0015] Mutations in microbial polypeptides may occur, for example, at any site where an antimicrobial agent typically binds. A microbial cell expressing such a mutated microbial polypeptide in lieu of its wild-type counterpart is resistant to an antimicrobial agent. In the case of RpoB polypeptides, for example, drug resistance-conferring mutations often occur in the rifampin-binding site within the β subunit. Mutated RpoB polypeptides may have a mutation at one or more of the amino acid positions corresponding to amino acid positions 137, 464, 466, 468, 471, 477, 481, 484, 486, and 527 of S. aureus RpoB. Exemplary S. aureus mutations are Q137L, S464P, L466S, Q468R, Q468K, D471V, D471Y, D471G, D471E, A477V, A477D, H481D, H481R, H481Y, H481N, R484H, R484S, R484C, S486L, I527P, and I527M. Mutated microbial polypeptides may be derived from any microbial pathogen (e.g., bacterium (e.g., a Gram-positive bacterium), fungus, virus, or parasite). Exemplary bacteria are Bacillus anthracis, Bacillus cereus, Bacillus subtilis, Chlamydia pneumoniae, Chlamydia trachomatis, Enterococcus faecium, Escherichia coli, Haemophilus influenzae, Helicobacter pylori, Listeria monocytogenes, Mycobacterium tuberculosis, Neisseria meningitidis, Staphylococcus aureus, Streptococcus pneumoniae, and Streptococcus pyogenes.

[0016] The invention also features a surface on which a plurality of mutated microbial polypeptides conferring drug resistance is arrayed. The polypeptides may be within a bacterial cell or may be in a cell-free environment. The mutated microbial polypeptides are arranged on the surface such that, when contacted with a candidate compound, each polypeptide-candidate compound contacting event is segregated from the others. The polypeptides may be in solution (e.g., each in its own well of a multiwell plate) or may be immobilized on the surface (e.g., in wells of a multiwell plate or on a slide). Desirably, the polypeptides are mutated RpoB polypeptides. In a related aspect, the invention also features a plurality of chromatographic columns, wherein each column has a mutated microbial polypeptide conferring drug resistance (e.g., a mutated RpoB polypeptide).

[0017] The invention further features a method of measuring RNA polymerase activity that makes use of molecular beacon probes. Such a probe is an oligonucleotide molecule that is covalently linked to a quencher at the 5′ or 3′end and to a fluorophore at the opposite end. The probe contains a nucleotide sequence that forms a hairpin structure having a stem region that contains a double stranded segment formed between two complementary nucleotide sequences under suitable conditions. The formation of such a double stranded segment brings the fluorophore and quencher into close proximity, resulting in inhibition or reduction in fluorescence emission by the fluorophore. The method of the invention involves the steps of: (a) providing the molecular beacon probe of the invention described above; (b) contacting this probe with a test sample under conditions allowing transcription from the probe; and (c) measuring the level of fluorescence emission from the test sample relative to a control sample, such that an increase in fluorescence identifies the test sample as containing RNA polymerase polypeptides associated with biological activity. According to our assay, in the presence of a biologically active RNA polymerase polypeptide, an RNA transcript is produced from the probe. This RNA transcript binds to the complementary probe producing a RNA:DNA hybrid that disrupts the double stranded stem region of the probe. This disruption causes the fluorophore and quencher to physically separate, resulting in an increase in the emission of fluorescence from the fluorophore. An essential feature of the assay is that the transcription template is the molecular beacon probe rather than any other templates that may be present in the sample. This assay is therefore useful to detect RNA polymerase activity in any of the mutated RNA polymerase polypeptides of the invention (e.g., RpoB polypeptides). Desirably, the increase in the emission of fluorescence is at least 10%, 20%, 30%, 40%, 50%, 60%, 70%, 80%, 90%, 100%, or more than that of a control sample. The measurement of fluorescence is standard in the art and is described, for example, by Liu et al. (Anal. Biochem. 300:40-45, 2002).

[0018] The above method is also useful, for example, to identify a candidate compound as having the ability to inhibit the growth of drug resistant microbial pathogens. In this method, a candidate compound is contacted with one or more than one mutated microbial polypeptides (e.g., RNA polymerase, preferably containing an RpoB subunit) conferring drug resistance and the molecular beacon probe described above. If a plurality of mutated microbial polypeptides is employed in the present screening methods, the contacting event occurs under conditions that ensure that each contacting event is segregated from the others. The biological activity of RNA polymerase is determined in each contacting event using the method described above. A candidate compound that reduces the biological activity of at least two mutated microbial polypeptides is identified as a compound having the ability to reduce the growth of drug resistant microbial pathogens.

[0019] A microbial pathogen expressing a mutant microbial polypeptide is considered “drug resistant” if it has an increased ability to withstand the harmful or toxic effects of at least one antimicrobial agent relative to its wild-type counterpart, as measured by any standard method in the art. Accordingly, the growth rate of the drug resistant pathogen in the presence of an antimicrobial agent may be at least 10%, 20%, 30%, 40%, 50%, 60%, 70%, 80%, 90%, or 100% greater than that of the wild-type microbial pathogen. Alternatively, a drug resistant microbial pathogen includes those for which the ability of the antimicrobial agent to inhibit infection or growth is reduced by at least 10%, 20%, 30%, 40%, 50%, 60%, 70%, 80%, 90%, or 100% relative to the wild-type pathogen, as measured by any standard method such as those described herein (e.g., MIC assay).

[0020] Compounds “having antimicrobial properties against drug resistant microbial pathogens” are those that inhibit infection or the growth of such pathogens. Such inhibition may be at least 10%, 20%, 30%, 40%, 50%, 60%, 70%, 80%, 90%, or 100%, relative to an untreated control.

[0021] By a “mutated microbial polypeptide conferring drug resistance” is meant that the polypeptide contains at least one mutation (e.g., an amino acid substitution, insertion, or deletion) but nonetheless exhibits an activity common to its related, wild-type microbial polypeptide. The activity may be at levels that are reduced relative to the wild-type polypeptide. When the mutated polypeptide is expressed in a microbial organism in lieu of its wild-type counterpart, the microbial organism exhibits drug resistance. Accordingly, the ability of the organism to withstand the toxic effects of at least one antimicrobial agent is increased by at least 10%, 20%, 30%, 40%, 50%, 60%, 70%, 80%, 90%, or 100%, relative to that of the wild-type. A mutated microbial polypeptide is considered to “have biological activity” if it has at least 20%, 30%, 40%, 50%, 60%, 70%, 80%, 90%, or 100% of the biological activity of the naturally occurring microbial polypeptide as measured by any standard method. For example, one of the biological activities of the naturally occurring RNA polymerase polypeptide is the production of RNA from a DNA template.

[0022] By “RNA polymerase polypeptide” is meant a polypeptide that is substantially identical to a portion of or the entire sequence of a polypeptide subunit of a naturally occurring RNA polymerase. Accordingly, the RNA polymerase polypeptide of the invention need not be substantially identical to the full length, naturally occurring RNA polymerase but may simply be substantially identical to a portion within the full length sequence. Desirably, the RNA polymerase polypeptide contains a sequence that is substantially identical to the β subunit of the wild type RNA polymerase.

[0023] By “substantially identical,” when referring to a protein or polypeptide, is meant a protein or polypeptide exhibiting at least 75%, but preferably 85%, more preferably 90%, most preferably 95%, or even 99% identity to a reference amino acid sequence. For proteins or polypeptides, the length of comparison sequences will generally be at least 10, 20, 30, 40, 50, 60, 70, 80, 90, 100, 150, 200, 300 amino acids, or the full length protein or polypeptide. Nucleic acids that encode such “substantially identical” proteins or polypeptides constitute an example of “substantially identical” nucleic acids; it is recognized that the nucleic acids include any sequence, due to the degeneracy of the genetic code, that encodes those proteins or polypeptides. In addition, a “substantially identical” nucleic acid sequence also includes a polynucleotide that hybridizes to a reference nucleic acid molecule under high stringency conditions.

[0024] By “high stringency conditions” is meant any set of conditions that are characterized by high temperature and low ionic strength and allow hybridization comparable with those resulting from the use of a DNA probe of at least 40 nucleotides in length, in a buffer containing 0.5 M NaHPO₄, pH 7.2, 7% SDS, 1 mM EDTA, and 1% BSA (Fraction V), at a temperature of 65° C., or a buffer containing 48% formamide, 4.8×SSC, 0.2 M Tris-Cl, pH 7.6, 1× Denhardt's solution, 10% dextran sulfate, and 0.1% SDS, at a temperature of 42° C. Other conditions for high stringency hybridization, such as for PCR, Northern, Southern, or in situ hybridization, DNA sequencing, etc., are well known by those skilled in the art of molecular biology. See, e.g., F. Ausubel et al., Current Protocols in Molecular Biology, John Wiley & Sons, New York, N.Y., 1998, hereby incorporated by reference.

[0025] By a “candidate compound” is meant a chemical, be it naturally-occurring or artificially-derived. Candidate compounds may include, for example, peptides, polypeptides, peptide nucleic acids, synthetic organic molecules, naturally occurring organic molecules, nucleic acid molecules, and components thereof.

[0026] By a “derivative compound of an antimicrobial compound” is meant a chemical (e.g., peptides, polypeptides, peptide nucleic acids, synthetic organic molecules, naturally occurring organic molecules, nucleic acid molecules, and components thereof) that shares chemical, structural, or functional similarities with a compound known to have antimicrobial activity. The antimicrobial compound (from which the derivative compound is produced) may or may not be used as the starting material for the production of the derivative compound. Accordingly, the antimicrobial compound may simply be required to provide chemical, structural, or functional information for the production of the derivative compound, thereby functioning as a lead compound in the design of improved antimicrobial compounds.

[0027] By “amino acid position corresponding to S. aureus RpoB position X” is meant that an amino acid is located in an RpoB polypeptide at a position analogous to position X of S. aureus RpoB. For various bacteria, amino acid positions corresponding to S. aureus RpoB position X are shown in Table 1 and FIGS. 1A-1B. Other analogous positions may be determined by aligning the desired RpoB polypeptide with S. aureus RpoB (GenBank Accession No. 15926220) using BLAST2 (Tatiana et al., FEMS Microbiol. Lett. 174:247-250, 1999) and default parameters (Matrix: BLOSUM62 (Henikoff et al., Proc. Natl. Acad. Sci. 89: 10915-10919, 1992); gap open: 11; gap extension: 1; x_dropoff: 30; expect: 10; wordsize: 3; filter: yes).

[0028] By “polypeptide” is meant any chain of more than two amino acids, regardless of post-translational modification such as glycosylation or phosphorylation.

[0029] By “substantially pure polypeptide” is meant a polypeptide that has been separated from the components that naturally accompany it. Typically, the polypeptide is substantially pure when it is at least 60%, by weight, free from the proteins and naturally-occurring organic molecules with which it is naturally associated. Preferably, the polypeptide is at least 75%, more preferably at least 90%, and most preferably at least 99%, by weight, pure. A substantially pure polypeptide may be obtained by any standard method (as described herein), for example, by extraction from a natural source, by expression of a recombinant nucleic acid encoding the polypeptide, or by chemical synthesis of the polypeptide. Purity may be measured by any appropriate method, e.g., by column chromatography, polyacrylamide gel electrophoresis, or HPLC analysis.

[0030] A polypeptide is substantially free of naturally associated components when it is separated from those contaminants that accompany it in its natural state. Thus, a polypeptide that is chemically synthesized or produced in a cellular system different from the cell from which it naturally originates will be substantially free from its naturally associated components. Accordingly, substantially pure polypeptides include those that naturally occur in eukaryotic organisms but are synthesized in E. coli, yeast, or other microbial system.

[0031] By “obligate intracellular pathogen” is meant a microbe that must use an intracellular location (e.g., a host cell) in order to replicate.

[0032] By “facultative intracellular pathogen” is meant a microbe that is able to survive within an intracellular location (e.g., a host cell), but does not require an intracellular environment to replicate.

TABLE 1
Amino acid positions in bacteria corresponding to S. aureus RpoB positions

| | Organism GenBank Accession No. | | | | | | | | |
|---|---|---|---|---|---|---|---|---|---|
| | S. aureus | B. anthracis | B. cereus | B. subtilis | C. pneumoniae | C. trachomatis | C. perfringens | E. Coli | E. faecalis |
| | 15926220 | 30260293 | 42779183 | 585920 | 8978454 | 6831647 | 18146079 | 13364386 | 41017700 |
| Amino | 135 | 135 | 135 | 135 | 136 | 136 | 135 | 146 | 138 |
| acid | 137 | 137 | 137 | 137 | 138 | 138 | 137 | 148 | 140 |
| position | 464 | 464 | 464 | 465 | 454 | 454 | 485 | 509 | 472 |
| | 466 | 466 | 466 | 467 | 456 | 456 | 487 | 511 | 474 |
| | 467 | 467 | 467 | 468 | 457 | 457 | 488 | 512 | 475 |
| | 468 | 468 | 468 | 469 | 458 | 458 | 489 | 513 | 476 |
| | 471 | 471 | 471 | 472 | 461 | 461 | 492 | 516 | 479 |
| | 477 | 477 | 477 | 478 | 467 | 467 | 498 | 522 | 485 |
| | 481 | 481 | 481 | 482 | 471 | 471 | 502 | 526 | 489 |
| | 484 | 484 | 484 | 485 | 474 | 474 | 505 | 529 | 492 |
| | 486 | 486 | 486 | 487 | 476 | 476 | 507 | 531 | 494 |
| | 527 | 527 | 527 | 528 | 517 | 517 | 548 | 572 | 535 |
| | 571 | 571 | 571 | 572 | 559 | 559 | 592 | 614 | 579 |
| | 651 | 651 | 651 | 652 | 639 | 639 | 672 | 694 | 659 |
| | 665 | 665 | 665 | 666 | 653 | 653 | 686 | 708 | 673 |

Organism GenBank Accession No.

| | E. faecium | H. influenzae | H. pylori | L. monocytogenes | M. tuberculosis | N. meningitidis | S. pneumoniae | S. pyogenes |
|---|---|---|---|---|---|---|---|---|
| | 41017745 | 1173148 | 15645812 | 6002201 | 13880218 | 15676060 | 15903819 | 21903792 |
| Amino | 138 | 146 | 149 | 138 | 176 | 152 | 148 | 135 |
| acid | 140 | 148 | 151 | 140 | 178 | 154 | 150 | 137 |
| position | 472 | 509 | 523 | 466 | 434 | 539 | 482 | 469 |
| | 474 | 511 | 525 | 468 | 436 | 540 | 484 | 471 |
| | 475 | 512 | 526 | 469 | 437 | 541 | 485 | 472 |
| | 476 | 513 | 527 | 470 | 438 | 542 | 486 | 473 |
| | 479 | 516 | 530 | 473 | 441 | 545 | 489 | 476 |
| | 485 | 522 | 536 | 479 | 447 | 551 | 495 | 482 |
| | 489 | 526 | 540 | 483 | 451 | 555 | 499 | 486 |
| | 492 | 529 | 543 | 486 | 454 | 558 | 502 | 489 |
| | 494 | 531 | 545 | 488 | 456 | 560 | 504 | 491 |
| | 535 | 572 | 586 | 529 | 497 | 601 | 545 | 532 |
| | 579 | 614 | 628 | 573 | 539 | 643 | 589 | 576 |
| | 659 | 695 | 708 | 653 | 620 | 723 | 669 | 656 |
| | 673 | 709 | 722 | 667 | 634 | 737 | 683 | 670 |

[0033] By “fusion protein” is meant a first polypeptide fused to a second, heterologous polypeptide. For example, the mutated microbial polypeptide of the invention may be fused to a second, heterologous polypeptide.

[0034] By “reporter polypeptide” is meant one whose expression may be specifically assayed. Reporter polypeptides include, without limitation, glucuronidase (GUS), luciferase, chloramphenicol transacetylase (CAT), green fluorescent protein (GFP), alkaline phosphatase, and β-galactosidase.

[0035] By “specifically binds” is meant that a small molecule, peptide, antibody, or polypeptide binds a second small molecule, peptide, antibody, or polypeptide but does not substantially recognize and bind other molecules in a sample, e.g., a biological sample. Desirably, such binding is at least 10%, 20%, 30%, 40%, 50%, 60%, 70%, 80%, 90%, or 100% greater than binding to non-specific sample components.

[0036] The predominant mechanism of microbial drug resistance is largely attributed to mutations in the genes encoding microbial polypeptides that are targeted by antimicrobial drugs. The present invention features screening methods for identifying antimicrobial agents that inhibit the growth of drug resistant microbial agents. Because these screening assays specifically identify compounds that bind and/or reduce the expression level or biological activity of drug resistance-conferring polypeptides, antimicrobial agents having the ability to target drug resistant microbial pathogens can be readily detected. In particular, the invention provides screening methods that make use of a plurality of drug resistance-conferring polypeptides. The use of a panel of such polypeptides results in the fine-tuning of antimicrobial agents that can specifically and effectively inhibit the growth of drug resistant microbial pathogens.

[0037] Other features and advantages of the invention will be apparent from the following detailed description and from the claims.

### BRIEF DESCRIPTION OF THE DRAWINGS

[0038] FIGS. 1A and 1B show a schematic diagram indicating RpoB mutations in various microbial pathogens.

[0039] FIG. 2 is a schematic diagram of an assay that utilizes molecular beacons as probes to measure transcription.

[0040] FIG. 3 is a schematic diagram of a second assay that measures transcription.

[0041] FIG. 4 is a graph showing the activity of RNA polymerase in the presence of rifampicin and rifalazil.

### DETAILED DESCRIPTION

[0042] The increasing rate of microbial drug resistance is largely attributed to the ability of pathogens to rapidly adapt to environmental pressures. Upon drug exposure, drug resistant mutants emerge through the natural selection of microbial species in which the microbial polypeptides targeted by antimicrobial drugs have been mutated. In spite of their antibacterial efficacy, rifamycins, for example, can eventually become less effective as drug resistant mutants emerge. Resistance to rifamycins typically occurs as a result of a mutation in the gene encoding the β subunit of RNA polymerase (RpoB), which contains the rifampin-binding site as defined by X-ray crystal structure.

[0043] Here, we describe screening methods that make use of a comprehensive panel of bacterial mutant strains resistant to rifamycins to identify compounds having improved interactions with mutated target bacterial RNA polymerase polypeptides. Using these methods, antibacterial agents that function as inhibitors of the mutated RNA polymerases are identified. Because antimicrobial agents are identified based specifically on their ability to interact with the microbial polypeptides conferring drug resistance, antimicrobial agents that overcome that resistance may be isolated. Using this general approach, a wide range of new antimicrobials may be identified by using mutated polypeptides that confer resistance to other antibiotics.

Screening Assays

[0044] As indicated above, in the present assays, candidate compounds are screened for their ability to interact with mutated microbial polypeptides. Particularly useful candidate compounds have the ability to interact with a plurality of mutated microbial polypeptides, thereby reducing or inhibiting the biological activity of such polypeptides. Thus, these methods desirably employ a plurality of mutated microbial polypeptides (e.g., at least 2, 3, 4, 5, 10, 15, 20, 30, 40, or more than 40 different mutated microbial polypeptides). These polypeptides may be different mutants of the same wild-type microbial polypeptide, or alternatively, mutants of different wild-type microbial polypeptides. Furthermore, a candidate compound may be contacted with various different, mutated RpoB polypeptides derived from two or more different bacterial species. A candidate compound is identified as being an antimicrobial compound if it interacts with at least one, two, or more mutated microbial polypeptides. The present methods are useful for screening compounds having an effect on a variety of microbial organisms, including, but not limited to, bacteria, viruses, fungi, annelids, nematodes, platyhelminthes, and protozoans.

[0045] Interactions between candidate compounds and mutated microbial polypeptides may be assessed by any standard method, such as those that measure or detect direct binding, competitive binding, enzymatic activity, cell growth, or transcription. The screen may initially involve a pool of candidate compounds, from which one or more useful compounds are isolated in a step-wise fashion. Desirably, the testing of unknown compounds involves high throughput screens (see, for example, Williams, Medicinal Research Reviews, 11:147-184, 1991; Sweetnam, et al., J. Natural Products, 56:441-455, 1993).

[0046] Overall, the invention provides a simple means for identifying antimicrobial compounds (including peptides, small molecule inhibitors, and mimetics) effective against drug resistant microbial pathogens. Accordingly, a chemical entity discovered to have medicinal or agricultural value using the methods described herein are useful as either drugs, plant protectants, or as information for structural modification of existing anti-pathogenic compounds, e.g., by rational drug design. Compounds isolated by this approach may be used, for example, as therapeutics to treat or prevent a microbial infection.

Microbial Polypeptide Expression and Purification

[0047] For their use in the present invention, recombinant mutated microbial polypeptides may be produced using any standard technique known in the art. Following their production, these polypeptides are useful, for example, for the identification of therapeutic compounds using the methods described herein.

[0048] Host cells, such as yeast, bacterial, mammalian, and insect cells, may produce any of the polynucleotides of the present invention. These cells may produce such polynucleotides endogenously or may alternatively be genetically engineered to do so. Polynucleotides may be introduced into host cells using any standard method known in the art, including, for example, calcium phosphate transfection, DEAE-dextran mediated transfection, transvection, microinjection, cationic lipid-mediated transfection, electroporation, transduction, ballistic introduction, and infection or fusion with carriers such as liposomes, micelles, ghost cells, and protoplasts.

[0049] In general, any expression system or vector that is able to maintain, propagate, or express a polynucleotide to produce a polypeptide in a host may be used. These include chromosomal, episomal, and virus-derived systems such as vector-derived bacterial plasmids, bacteriophages, transposons, yeast episomes, insertion elements, yeast chromosomal elements, viruses (such as baculoviruses, papova viruses (e.g., SV40), vaccinia viruses, adenoviruses, fowl pox viruses, pseudorabies viruses, and retroviruses), and vectors derived from combinations thereof, such as those derived from plasmid and bacteriophage genetic elements, such as cosmids and phagemids. Preferred expression vectors include, but are not limited to, pcDNA3 (Invitrogen) and pSVL (Pharmacia Biotech). Other exemplary expression vectors include pSPORT vectors, pGEM vectors (Promega), pPROEXvectors (LTI, Bethesda, Md.), Bluescript vectors (Stratagene), pQE vectors (Qiagen), pSE420 (Invitrogen), and pYES2 (Invitrogen). Optionally, the expression systems may contain control regions that facilitate or regulate expression. The appropriate polynucleotide may be inserted into an expression system by any of a variety of well-known and routine techniques, including transformation, transfection, electroporation, nuclear injection, or fusion with carriers such as liposomes, micelles, ghost cells, and protoplasts.

[0050] Expression systems of the invention include bacterial, yeast, fungal, plant, insect, invertebrate, vertebrate, and mammalian cells systems. If a eukaryotic expression vector is employed, then the appropriate host cell is any eukaryotic cell capable of expressing the cloned sequence. Preferably, eukaryotic cells are cells of higher eukaryotes. Suitable eukaryotic cells include non-human mammalian tissue culture cells and human tissue culture cells. Preferred host cells include insect cells, HeLa cells, Chinese hamster ovary cells (CHO cells), African green monkey kidney cells (COS cells), human 293 cells, murine embryonal stem (ES) cells, and murine 3T3 fibroblasts. The propagation of such cells in cell culture is standard in the art. Yeast hosts may also be employed as a host cell. Preferred yeast cells include the genera Saccharomyces, Pichia, and Kluveromyces. Preferred yeast hosts are Saccharomyces cerevisiae and Pichia pastoris. Yeast vectors may contain any of the following elements: an origin of replication sequence from a 2T yeast plasmid, an autonomous replication sequence (ARS), a promoter region, sequences for polyadenylation, sequences for transcription termination, and a selectable marker gene. Shuttle vectors for replication in both yeast and E. coli are also included herein.

[0051] Alternatively, insect cells may be used as host cells. In a preferred embodiment, the polypeptides of the invention are expressed using a baculovirus expression system. The Bac-to-Bac complete baculovirus expression system (Invitrogen) may be used, for example, for protein production in insect cells.

[0052] Expression of polypeptides in prokaryotes is most often carried out in E. coli with vectors containing constitutive or inducible promoters directing the expression of either fusion or non-fusion proteins. Fusion vectors add a number of amino acids to a polypeptide encoded therein, usually to the amino terminus of the recombinant polypeptide. Such fusion vectors typically serve three purposes: 1) to increase expression of recombinant protein; 2) to increase the solubility of the recombinant protein; and 3) to aid in the purification of the recombinant protein by acting as a ligand in affinity purification. Often, in fusion expression vectors, a proteolytic cleavage site is introduced at the junction of the fusion moiety and the recombinant polypeptide to enable separation of the recombinant protein from the fusion moiety subsequent to purification of the fusion protein. Such enzymes, and their cognate recognition sequences, include Factor Xa, thrombin, and enterokinase. Typical fusion expression vectors include pGEX, pMAL, and pRIT5, which fuse glutathione S-transferase (GST), maltose E binding protein, and protein A, respectively, to the target recombinant protein.

[0053] The polypeptides of the present invention may also be expressed at the surface of cells, which are then harvested prior to use in the screening assay. If the polypeptide is secreted into the medium, the medium may be recovered in order to recover and purify the polypeptide. If produced intracellularly, the cells must first be lysed before the polypeptide is recovered. Polypeptides of the present invention may be recovered and purified from recombinant cell cultures or lysates by well-known methods including ammonium sulfate or ethanol precipitation, acid extraction, anion or cation exchange chromatography, phosphocellulose chromatography, hydrophobic interaction chromatography, affinity chromatography, hydroxyapatite chromatography, and lectin chromatography. Most preferably, high performance liquid chromatography is employed for purification. Well-known techniques for refolding proteins may be employed to regenerate active conformation when the polypeptide is denatured during intracellular synthesis, isolation, and/or purification.

[0054] Optionally, the polypeptides of the present invention may be prepared by chemical synthesis using, for example, automated peptide synthesizers.

Candidate Compounds

[0055] Candidate compounds (e.g., organic molecules, peptides, peptide mimetics, polypeptides, nucleic acids, or antibodies) may be obtained using any of the numerous approaches in combinatorial library methods known in the art, including: biological libraries; spatially addressable parallel solid phase or solution phase libraries; synthetic library methods requiring deconvolution; the ‘one-bead one-compound’ library method; and synthetic library methods using affinity chromatography selection. The biological library approach is limited to peptide libraries, while the other four approaches are applicable to peptide, non-peptide oligomer or small molecule libraries of compounds (see e.g., Lam, Anticancer Drug Des. 12:145, 1997).

[0056] Examples of methods for the synthesis of molecular libraries can be found in the art, for example in: DeWitt et al., Proc. Natl. Acad Sci. USA. 90:6909, 1993; Erb et al., Proc. Natl. Acad Sci. USA 91:11422, 1994; Zuckermann et al., J. Med. Chem. 37:2678, 1994; Cho et al., Science 261:1303, 1993; Carrell et al., Angew. Chem. Int. Ed. Engl. 33:2059, 1994; Carell et al., Angew. Chem. Int. Ed. Engl. 33:2061, 1994; and Gallop et al., J. Med. Chem. 37:1233, 1994. Libraries of compounds may be presented in solution (Houghten, Biotechniques 13:412-421, 1992), or on beads (Lam, Nature 354:82-84, 1991), chips (Fodor, Nature 364:555-556, 1993), bacteria (Ladner U.S. Pat. No. 5,223,409), spores (Ladner U.S. Pat. No. 5,223,409), plasmids (Cull et al., Proc. Natl. Acad. Sci. USA 89:1865-1869, 1992) or on phage (Scott et al., Science 249:386-390, 1990; Devlin, Science 249:404-406, 1990; Cwirla et al., Proc. Natl. Acad. Sci. 87:6378-6382 1990; Felici, J. Mol. Biol. 222:301-310, 1991).

[0057] Optionally, either the mutated microbial polypeptide or the candidate compound may include a label or tag that facilitates their isolation. For polypeptides, an exemplary tag of this type is a poly-histidine sequence generally containing around six histidine residues that permits the isolation of a compound so labeled by means of nickel chelation. Other labels and tags, such as the FLAG tag (Eastman Kodak, Rochester, N.Y.), are well known and are routinely used in the art. Small molecules may be radiolabeled for detection.

Interaction Assays

[0058] One method to identify antimicrobial agents involves screening for compounds that physically interact with mutated microbial polypeptides. Such compounds are identified as being candidate antimicrobial compounds effective against drug-resistant microbial pathogens. Recombinant mutated microbial polypeptides (produced by any standard methods such as those as described above) are preferred for binding assays, particularly in high-throughput screens because they allow for better specificity (higher relative purity), provide the ability to generate large amounts of material, and can be used in a broad variety of formats (see, e.g., Hodgson, Bio/Technology, 10:973-980, 1992).

[0059] Binding may be determined by various assays well known in the art, including gel-shift assays, western blots, radiolabeled competition assay, phage-based expression cloning, co-fractionation by chromatography, co-precipitation, cross-linking, interaction trap/two-hybrid analysis, southwestern analysis, ELISA, and the like, which are described, for example, in Current Protocols in Molecular Biology, 2001, John Wiley & Sons, NY, which is incorporated herein by reference.

[0060] As discussed above, in any of the foregoing assays, the mutated microbial polypeptide or the candidate compound may be labeled with a detectable label to facilitate the detection of binding. In some instances, it may be desirable to immobilize the mutated microbial polypeptide(s) or the candidate compound(s). Immobilization may be accomplished using any of the methods well known in the art, including covalent bonding to a support, a bead, or a chromatographic resin; non-covalent, high affinity interactions such as antibody binding; or use of streptavidin/biotin binding such that the immobilized compound includes a biotin moiety. Thus, the detection of binding may be accomplished using (i) a radioactive label on the compound that is not immobilized, (ii) a fluorescent label on the non-immobilized compound, (iii) an antibody immunospecific, for the non-immobilized compound, or (iv) a label on the non-immobilized compound that excites a fluorescent support to which the immobilized compound is attached.

[0061] In one embodiment, the screening method of the invention includes the steps of (a) contacting one or more mutated microbial polypeptides with one or more candidate compounds; and (b) measuring binding between the compound(s) and mutated microbial polypeptide(s). Desirably, a plurality of mutated microbial polypeptides is employed, in which case each contacting event is physically separated from the others. Binding may be measured directly (e.g., by using a labeled compound as described above) or indirectly using any of a number of techniques. Following steps (a) and (b), compounds identified as binding a mutated microbial polypeptide may be further tested in other assays, including assays of biological activity or cell growth.

[0062] As a specific example, a candidate compound that binds a mutated microbial polypeptide may be identified using a chromatography-based technique. Accordingly, a recombinant mutated microbial polypeptide, such as S. aureus RpoB containing a Q468K mutation, may be purified by standard techniques from cells engineered to express the polypeptide and then immobilized on a column. A solution containing candidate compounds is then passed through the column, and compounds that bind the mutated microbial polypeptide are identified. To isolate the compound, the column is washed to remove non-specifically bound molecules, and the compounds of interest are released from the column and collected. Compounds that bind the first mutated microbial polypeptide may optionally be assayed in additional columns against other mutated microbial polypeptides. Compounds that are identified as binding to one or more mutated microbial polypeptides with an affinity constant less than or equal to 10 mM are considered particularly useful in the invention.

[0063] In another method, a mutated microbial polypeptide is incubated with one or more candidate compounds and binding is detected by liquid chromatography mass spectrometry (LCMS), nuclear magnetic resonance spectroscopy (NMR) analysis, or surface plasmon resonance (i.e. Biacore technology). Binding may be determined using a radiolabeled candidate compound followed by ultrafiltration, ultracentrifugation of the mutated polypeptide-candidate compound complex, gel electrophoresis of the mutated polypeptide-candidate compound complex, equilibrium dialysis, or capillary electrophoresis. Radioactive ligand specifically bound to the receptor in preparations made from the cell line expressing the recombinant mutated microbial polypeptide can be detected in a variety of ways, including filtration of the receptor-ligand complex to separate bound ligand from unbound ligand. Alternative methods involve a scintillation proximity assay (SPA) or a FlashPlate format, in which such separation is unnecessary (see, e.g., Nakayama, Curr. Opinion Drug Disc. Dev., 1:85-91, 1998; Boss et al., J. Biomolec. Screening, 3: 285-292, 1998). Other useful assays involve the use of various enzymatic reactions including, photometric, radiometric, HPLC, and electrochemical reactions, which are described in, for example, Enzyme Assays: A Practical Approach, eds. R. Eisenthal and M. J. Danson, 1992, Oxford University Press, which is incorporated herein by reference in its entirety. Binding of fluorescent ligands can be detected in various ways, including fluorescence energy transfer (FRET), direct spectrophotofluorometric analysis of bound ligand, and fluorescence polarization (Rogers, Drug Discovery Today, 2:156-160, 1997; Hill, Cur. Opinion Drug Disc. Dev.192-97, 1998). The FRET assay, for example, may be performed by: (a) providing a mutated microbial polypeptide of the invention or a suitable polypeptide fragment thereof, either of which is coupled to a suitable FRET donor (e.g., nitro-benzoxadiazole (NBD)); (b) labeling a candidate compound with a FRET acceptor (e.g., rhodamine); (c) contacting the acceptor-labeled candidate compound and the donor-labeled mutated microbial polypeptide; and (d) measuring fluorescence resonance energy transfer. Quenching and FRET assays are related. Either one of these assays may be applied in a given case, depending on which pair of fluorophores is used in the assay.

[0064] A further method for identifying compounds that bind mutated microbial polypeptides is described in Wieboldt et al. (Anal. Chem., 69:1683-1691, 1997), incorporated herein by reference in its entirety. This technique screens combinatorial libraries of 20-30 agents at a time in solution phase for binding to a target polypeptide. Candidate compounds that bind the target polypeptide are separated from other library components by simple membrane washing. The specifically selected molecules that are retained on the filter are subsequently liberated from the target polypeptide and analyzed by high-pressure liquid chromatography (HPLC) and pneumatically-assisted electrospray (ion spray) ionization mass spectroscopy. This procedure selects library components with the greatest affinity for the target polypeptide, and may be particularly useful for small molecule libraries.

[0065] Binding may also be detected using competitive screening assays in which proteins (e.g., neutralizing antibodies) capable of binding a mutated microbial polypeptide of the invention specifically compete with a candidate compound for binding to the polypeptide. For example, a candidate compound may be contacted with two polypeptides, the first polypeptide being a mutated microbial polypeptide of the invention (e.g., any one of the mutants described herein) and the second polypeptide being a polypeptide that binds the first polypeptide under conditions that allow binding. In this respect, the second polypeptide may be any polypeptide that under normal conditions binds the first polypeptide, or alternatively, may be an antibody or an antibody fragment. For example, a candidate compound may be contacted in vitro with RpoB containing an H481D mutation and an antibody specific to this protein. Under the appropriate conditions, the mutated RpoB binds the antibody. According to this particular screening method, the interaction between these two proteins is measured following the addition of a candidate compound. A decrease in the binding of the first polypeptide to the second polypeptide following the addition of the candidate compound (relative to such binding in the absence of the compound) would identify the candidate compound as having the ability to bind the first protein and as having antimicrobial properties. Contacting of the candidate compound with the two proteins may occur in a cell-free system or using a yeast two-hybrid or three-hybrid system. If desired, the first polypeptide or the candidate compound may be immobilized on a support as described above or may have a detectable group. Alternatively, the candidate compound may be expressed on the surface of a phage or may be expressed using RNA display according to standard methods. Radiolabeled competitive binding studies are described in, for example, Lin et al. (Antimicrob. Agents Chemother., 41:2127-2131, 1997), the disclosure of which is incorporated herein by reference in its entirety. Optionally, binding may also be determined using competitive binding assays by displacing radiolabeled antibiotic, for example, by displacing rifampin or rifalazil with another unlabeled ansamycin.

[0066] Binding between a candidate compound and a mutated microbial polypeptide may also be determined by measuring the intrinsic fluorescence of the mutated microbial polypeptide and determining whether the intrinsic fluorescence is modulated in the presence of a candidate compound. Accordingly, fluorescence of the mutated microbial polypeptide is measured and compared to the fluorescence intensity of the mutated microbial polypeptide in the presence of candidate test compound, such that a decrease in fluorescence intensity indicates binding of the test compound to a mutated microbial polypeptide. Exemplary techniques are described in “Principles of Fluorescence Spectroscopy” by Joseph R. Lakowicz, New York, Plenum Press, and “Spectrophotometry And Spectrofluorometry” by C. L. Bashford and D. A. Harris Oxford, Washington, D.C., IRL Press, 1987, each of which is incorporated herein by reference in its entirety.

[0067] Another screening method to identify direct binding of compounds to a mutated microbial polypeptide relies on the principle that proteins generally exist as a mixture of folded and unfolded states, and continually alternate between the two states. When a candidate compound binds to the folded form of a mutated microbial polypeptide, the target protein molecule bound by the ligand remains in its folded state. Thus, the folded mutated microbial polypeptide is present to a greater extent in the presence of a compound that binds the mutated microbial polypeptide than in the absence of an interacting compound. Binding of the compound to the mutated microbial polypeptide can be determined by any method that distinguishes between the folded and unfolded states of the mutated microbial polypeptide (e.g., as described by Canet et al., Biophysical Journal, 80:1996-2003, 2001).

[0068] In another example, candidate compounds previously arrayed in the wells of a multi-well plate are incubated with the labeled mutated microbial polypeptide. Following washing, the wells with bound, labeled polypeptide are identified. Data obtained using different concentrations of mutated microbial polypeptides are used to calculate values for the number, affinity, and association of the polypeptide with the candidate compounds. If desired, the candidate compounds may be labeled instead of the mutated microbial polypeptide. Similarly, the mutated microbial polypeptide may be immobilized, e.g., in wells of a multi-well plate or on a solid support, and soluble compounds are then contacted with the mutated microbial polypeptide. Upon removal of unbound compound, the identity of bound candidate compounds is ascertained. Alternatively, interaction of unlabeled mutated microbial polypeptides may be detected using direct or indirect antibody labeling. Compounds that bind are considered to be candidate modulators of mutated microbial polypeptide biological activity.

Assays Measuring Biological Activity

[0069] Candidate compounds that interact with a mutated microbial polypeptide may also be identified based on their ability to reduce or inhibit the biological activity of the mutated microbial polypeptides of the invention in in vitro or in vivo assays (e.g., including animal models). Candidate compounds are contacted with a mutated microbial polypeptide having some level of a characteristic biological activity; the exact level of activity is unimportant and may be at least 10%, 20%, 30%, 40%, 50%, 60%, 70%, 80%, 90%, 100%, or more than 100% of the biological activity of the naturally-occurring, wild-type microbial polypeptide. Candidate compounds that reduce the biological activity of a mutated microbial polypeptide by at least 10%, 20%, 30%, 40%, 50%, 60%, 70%, 80%, 90%, 95%, or even 100% relative to an untreated control not contacted with the candidate compound are identified as compounds having antimicrobial activity against drug resistant microbial pathogens. Desirably, the candidate compound is contacted with a plurality of such polypeptides. This compound is identified as having antimicrobial activity against drug resistant microbial pathogens if it inhibits the biological activity of at least 1, 2, 3, 4, 5, 10, or more than 10 mutated microbial polypeptides. The identified compound may, but need not, also reduce the biological activity of the wild-type polypeptide by at least 10%, 20%, 30%, 40%, 50%, 60%, 70%, 70%, 80%, 95%, or even 100% relative to an untreated control.

[0070] In one example, a cell (e.g., a bacterial or fungal cell) expressing the mutated microbial polypeptide (e.g., any of the RpoB mutated polypeptides described herein) may be contacted with a candidate compound, after which the biological activity (e.g., RNA polymerase activity) of the microbial polypeptide is measured in the cell. In another example, contacting between candidate compounds and mutated microbial polypeptides occurs in a cell-free system or in an animal, and biological activity is then determined. Biological activity may be determined using any standard method, including those described herein. A candidate compound that reduces such biological activity relative to that of the same polypeptide in a cell not contacted with the candidate compound, identifies the candidate compound as an antimicrobial polypeptide.

[0071] To assess a change of biological activity for a mutated RpoB, for example, the IC₅₀ value may be determined using RNA polymerase assays. In these assays, cells are first permeabilized, contacted with the candidate compound, and exposed to radiolabelled RNA polymerase substrates, after which the biological activity of RNA polymerase is determined using any method known in the art or described herein. As a specific example, bacterial cells expressing mutated RpoB are first permeabilized by treatment with crushed ice or with toluene (Fisher et al., 1975. Ribonucleic acid synthesis in permeabilized mutant and wild type cells of Bacillus subtilis. In “Spores VI” (P. Gerhardt, R. N. Costilow and H. L. Sadoff, eds., American Society for Microbiology, Washington, D.C.). pp. 226-230). The candidate compound is next added to the cell culture media along with radiolabelled substrates and RpoB activity is measured.

[0072] A number of assays that employ molecular beacon probes may also be used to measure the biological activity of RNA polymerase. Molecular beacon probes are single-stranded oligonucleotide hybridization probes that form a stem-and-loop structure and that have a reporter dye attached on one end and a quencher attached at the other end. These probes typically range between 10 and 30 nucleotides, preferably between 15 and 25 nucleotides, and more preferably between 17 and 23 nucleotides. In contrast to linear oligonucleotide probes, molecular beacons contain a target-binding domain, flanked by two complementary short arm sequences. The length of these arms ranges between 4-10 nucleotides and preferably between 5-7 nucleotides. Because these arms are complementary to each other, the molecular beacon sequence forms a hairpin-loop structure. The sequence of the flanking complimentary arms may be independent of the target-binding domain sequence. Alternatively, the molecular beacon may be designed such that one arm participates both in stem formation (i.e. when the beacon is closed) and in target hybridization (i.e. when the beacon is open) (Tsourkas et al., Nucleic Acids Res. 30:4208-4215, 2002). Exemplary fluorophores include 5-Carboxyfluorescein (FAM), 6-hexachlorofluorescein (HEX), 6-Tetrachlorofluorescein (TET), Cy2, Cy3, Cy3.5, Cy5, Cy5.5, and Texas red-X. Typically, the quencher that is employed is dependent on the emission spectra of the fluorophore (see Marras et. al., Nucleic Acids Res. 30:e122, 2002). For example, FAM is typically covalently attached to the 5′ end of the oligonucleotide with Dabcyl as the preferred quencher at the 3′ end.

[0073] In solution or in the absence of a target-domain sequence, the close physical proximity of the fluorophore and quencher allows energy transfer from the donor (e.g. FAM) to the quencher (e.g. Dabcyl). Since the absorption spectra of the quencher is selected to overlap with the emission spectra of the fluorophore, the emitted electrons are captured and there is little or no fluorescence detected. When a probe hybridizes to a complementary nucleic acid strand containing a target sequence, however, the stem loop configuration is disrupted and the fluorophore and quencher are separated allowing the escape of the emitted electrons and emission of fluorescence. The rigidity and length of the probe-target hybrid precludes the simultaneous stable existence of the stem hybrid. Molecular beacon probes are designed so that their sequence is long enough for a perfectly complementary probe-target hybrid to be more stable than the stem loop configuration. The molecular beacon probes therefore spontaneously form fluorescent probe-target hybrids.

[0074] FIG. 2 is a schematic diagram illustrating one assay that utilizes such probes to detect RNA polymerase biological activity by measuring the production of RNA transcripts (as described by Liu et al. supra). In this assay, the molecular beacon probe is designed such that its “arms” share complementarity to the RNA transcript to be detected. This probe is added to a test solution in which transcription is to be detected. If RNA transcripts to which the molecular beacon probes are complementary are produced, the transcripts bind the probes and fluorescence is emitted. If no transcription is occurring, the probes remain in their stem-loop conformation.

[0075] Here, we have developed a new method to detect RNA polymerase activity using the molecular beacon probes described above. The principle of this assay is depicted in FIG. 3. One important feature of this method is that the molecular beacon probe functions as both the target nucleotide sequence and the detecting species. Thus, in contrast to the assay described above (illustrated in FIG. 2), this assay does not rely on an additional molecule for a DNA template, from which RNA transcripts are to be produced, since the molecular beacon probe itself functions as such. In the presence of a biologically active RNA polymerase, a short complementary RNA transcript is produced using the probe as a template. Because the transcript shares complementarity to one of the arms of the probe, it hybridizes to that arms thereby causing the beacon to unfold and emit fluorescence. A biologically inactive RNA polymerase polypeptide, however, would not produce any RNA transcript from the probe. As a result, the probe would remain unfolded and would not emit any fluorescence. FIG. 4 shows that a bacterial RNA polymerase may be specifically inhibited and detected using the present approach. Accordingly, our method is useful for the identification of candidate compounds that inhibit the growth of drug resistant microbial species.

[0076] Alternatively, RNA polymerase-dependent in vivo transcription may be determined by measuring the incorporation of radiolabeled uracil and comparing the level of inhibition of transcription to inhibition levels for other macromolecule synthetic processes, such as DNA synthesis, protein synthesis, or cell wall synthesis (Singh et al., Antimicrob. Agents Chemother. 44:2154-9, 2000).

Assays Measuring Cell Growth

[0077] Candidate compounds of the present invention may also be identified based on their ability to reduce or inhibit the growth of microbial pathogens that express one of a panel of target mutant microbial polypeptides. For example, a candidate compound may be contacted with a plurality of cell populations, such that each contacting event is segregated from the others. Each population of cells expresses a mutated microbial polypeptide. A candidate compound that reduces or inhibits the growth of at least two populations of cells expressing mutated polypeptides, relative to the growth of control populations not contacted with the candidate compound, is identified as a compound having antimicrobial activity against drug resistant pathogens. Compounds may be screened by measuring their minimum inhibitory concentration (MIC), using standard MIC in vitro assays (see, for example, Suchland et al., Antimicrob. Agents Chemother. 47:636-642,2003; Tomioka et al., Antimicrob. Agents Chemother. 37:67, 1993; Lee et al., Am. Rev. Respir. Dis. 136:349, 1987).

[0078] Optionally, assays measuring cell growth may also be employed to confirm that an antimicrobial compound identified by any of the other assays of the invention can effectively reduce the growth of resistant microbial organisms that express the mutated microbial polypeptides.

[0079] If the contacting event occurs in vivo, the antimicrobial activity of the candidate compound may be assessed by determining the survival of treated animals relative to untreated animals, the microbial load in treated animals relative to untreated animals, or both.

[0080] The following examples are meant to illustrate the invention. They are not meant to limit the invention in any way.

### EXAMPLE 1

### Identification of Drug-Resistant RpoB Mutants

[0081] S. aureus is one of the most frequently encountered Gram-positive pathogens. Drug resistance-conferring mutations typically occur within the β subunit of RNA polymerase (RpoB mutations), in the rifampin-binding site. We have identified a collection of rifampin-resistant S. aureus mutants, as shown in Table 2. Mutants of S. aureus were isolated by inoculating a culture of S. aureus ATCC strain 29213 (standard susceptibility testing strain) into medium containing rifampin or rifalazil; by inoculating S. aureus ATCC strain 29213 into medium containing chemical derivatives of rifamycin (NCEs); by inoculating S. aureus Smith, a variant optimally adapted to colonizing and causing disease in the mouse septicemia model, into medium containing rifampin; and by using the Ian Chopra collection, the parent strain of which is S. aureus 8325-4 and described previously by Oliva et al. (Antimicrob. Agents Chemother. 45:532-9, 2001). Mutants resistant to rifampin, rifalazil, or NCEs were selected either on drug-containing plates or in liquid culture.

[0082] The mutations identified in S. aureus were all located in analogous positions in other different microbial species (as described by Wichelhaus et al., Antimicrob. Agents Chemother. 43:2813-6, 1999; Wichelhaus et al., J. Antimicrob. Chemother. 47:153-6, 2001; Yang et al., J. Antimicrob. Chemother. 42:621-8, 1998; Park et al., Int. J. Tuberc. Lung Dis. 6:166-70, 2002; Moghazeh et al., Antimicrob. Agents Chemother. 40:2655-7, 1996; Williams et al., Antimicrob. Agents Chemother. 42:1853-7, 1998; Heep et al., Eur. J. Clin. Microbiol. Infect. Dis. 21:143-5, 2002, Oliva et al., supra). We have therefore generated similar panels with other microbial species, such as Escherichia coli, Bacillus subtilis, and Chlamydia trachomatis.

[0083] The restricted number of mutations resulting in amino acid changes in RpoB (as revealed by DNA sequencing) confirmed the comprehensive nature of the collection of mutants found in Table 2. Furthermore, an exhaustive search for additional mutated positions was not successful (Table 2). The introduction of such mutations into the RpoB gene in E. coli (Garibyan et al., NA Repair (Amst). 2:593-608, 2003) and in B. subtilis (Boor et al. J. Biol. Chem. 270:20329-36, 1995) was sufficient to confer strong resistance to rifampin. Accordingly, we concluded that the mutations in RpoB were responsible for the drug resistance phenotype.

TABLE 2
S. aureus RpoB mutants

| | Strain | number | | |
|---|---|---|---|---|
| Mutation* | background(s)** | isolated | MIC Rif | MIC Rfz |
| H481Y | 1, 2, 3 | 99 | >8 | >8 |
| Q468K | 1 | 31 | >8 | >8 |
| S464P | 1, 2, 4 | 9 | >8 | 1 |
| A477D | 1, 4 | 6 | >8 | 2-4 |
| Q468R | 1 | 4 | >8 | >8 |
| H481D | 1, 4 | 4 | >8 | >8 |
| S486L | 1, 2, 4 | 26 | >8 | >8 |
| I527P | 1 | 1 | 4 | 1 |
| R484H | 1, 3 | 15 | >8 | 8 |
| R484S | 1 | 1 | 8 | 0.5 |
| R484C | 3 | 3 | 2 | 0.5 |
| H481N | 1, 4 | 2 | 2 | 0.125 |
| I527M | 1 | 1 | 0.25 | 0.063 |
| A477V | 1, 2 | 10 | 1 | 0.063 |
| Q137L | 1, 4 | 2 | 0.25 | <0.031 |
| D471V | 3 | 1 | >8 | 2 |
| D471Y | 1, 2, 4 | 5 | 1 | 0.25 |
| D471G | 1, 2 | 8 | >8 | >8 |
| H481R | 3 | 1 | >8 | >8 |
| L466S | 1, 2, 4 | 3 | 0.25 | 0.016 |
| D471E | 4 | 1 | 0.25 | <0.031 |
| None** | | — | 0.015 | 0.015 |
| total | | 233 | | |

**Wild-type parent strains for these mutants include (1) ATCC S. aureus 29213, (2) S. aureus Smith, (3) S. aureus W59536 (G. Drusano laboratory), and (4) S. aureus 8325-4 (I. Chopra laboratory). All have the same MIC values for rifampin and rifalazil.

[0084] TABLE 3
MICs of NCEs against several S. aureus strains resistant to rifampin.

| | Mutant | SA-003 | SA-004 | SA-042 | SA-044 | SA-045 | SA-047 | SA-049 | |
|---|---|---|---|---|---|---|---|---|---|
| Compound | Score | H481Y^{a} | Q468K | S486L | D471Y | S464P | A477D | H481D | Deacetylated |
| 1 | 2 | 4 | 4 | 2 | ≦0.031 | ≦0.031 | 0.25 | 2 | |
| 2 | 0 | 2 | 4 | 2 | 0.125 | 2 | 0.5 | 2 | yes |
| 3 | 0 | 2 | 4 | 2 | 0.5 | 4 | 0.5 | 4 | yes |
| 4 | 2 | 4 | 4 | 2 | 0.063 | 0.125 | 0.5 | 2 | |
| 5 | 2 | 2 | 2 | 2 | 0.5 | 0.5 | 0.25 | 1 | yes |
| 6 | 0 | 4 | 4 | 2 | ≦0.031 | ≦0.031 | 0.25 | 2 | |
| 7 | 2 | 2 | 4 | 1 | ≦0.031 | ≦0.031 | 0.125 | 1 | |
| 8 | 0 | 2 | 4 | 4 | 0.125 | 2 | 0.5 | 2 | yes |
| 9 | 0 | 4 | 4 | 2 | 0.063 | ≦0.031 | 0.125 | 2 | |
| 10 | 0 | 4 | 4 | 2 | ≦0.031 | 1 | 0.25 | 2 | yes |
| 11 | 2 | 2 | 4 | 2 | 0.063 | 0.063 | 0.25 | 2 | |
| 12 | 2 | 4 | 4 | 2 | ≦0.031 | 0.063 | 0.25 | 2 | |
| 13 | 0 | 4 | 4 | 2 | 0.5 | 1 | 0.5 | 2 | yes |
| 14 | 2 | 2 | 4 | 2 | ≦0.031 | 0.063 | 0.5 | 4 | |
| 15 | 1 | 2 | 4 | 1 | 0.5 | 1 | 0.5 | 2 | yes |
| 16 | 2 | 2 | 2 | 4 | ≦0.031 | 0.063 | 0.25 | 2 | |
| 17 | 2 | 1 | 2 | 1 | 0.125 | 0.5 | 0.125 | 1 | yes |
| 18 | 0 | 4 | 4 | 1 | 0.063 | 0.063 | 0.25 | 4 | |
| 19 | 1 | 2 | 4 | 2 | ≦0.031 | 0.063 | 0.25 | 4 | |
| 20 | 1 | 2 | 4 | 2 | 0.125 | 0.5 | 0.125 | 2 | yes |
| 21 | 2 | 2 | 4 | 2 | ≦0.031 | ≦0.031 | 0.25 | 2 | |

^{a}RpoB mutation

Having identified these mutants, the minimum inhibitory concentrations (MIC) of a number of rifamycin derivatives were determined in microtiter trays by inoculating 1-8×10⁴ microorganisms in 100 μl of Mueller-Hinton Broth (cation adjusted) containing the indicated compound (Table 3) (National Committee for Clinical Laboratory Standards, Methods for Dilution Antimicrobial Susceptibility Tests for Bacteria That Grow Aerobically-Fourth Edition: Approved Standard M7-A4. NCCLS, Villanova, Pa., 1997). These cultures were incubated for 16-20 hours at 35° C. Based on our results, the most important mutants (conferring the strongest resistance) were identified for more extensive testing of NCEs. These mutants were H481Y, Q468K, S486L, D471Y, S464P, A477D, and H481D. The MICs of a number of candidates, all of which had an MIC at or below 0.015 μg/ml (the MIC of rifalazil) were determined in the same manner. The MICs showed a consistent pattern; compounds that showed superior MICs against mutant H481Y also showed MICs that were improved for the entire panel of mutants. In general, the panel of mutants H481Y, Q468K, S486L, D471Y, S464P, A477D, and H481D, which showed the highest MICs against all compounds, are mutant RpoB polypeptides that may be utilized in the screening methods of the invention. An exception to the uniformity of the measure of resistance is provided by the mutants D471Y and S464P, which together have lower MICs for some of the compounds compared to the rest. Compounds that tend to have lower MICs to mutants D471Y and S464P are often compounds that contain the acetyl group at position 25 of the rifalazil molecule, rather than deacetylated compounds at position 25, in compounds that otherwise have an identical structure. Deacetylated compounds are denoted in Table 3. However, these mutants do not have the strongest effect (i.e., they do not show the highest MICs) among the members of the mutant RpoB panel. Therefore, based on the knowledge garnered from this comprehensive set of mutants, it is possible to define a sub-population of mutants that are the most important to evaluate extensively for interactions between mutant RNA polymerase and rifamycin derivatives.

[0085] A further confirmation of the validity of MIC testing of the mutant panel was provided by our mutant score test. Using this strategy, compounds were individually tested for resistance development by inoculating 10⁹ cells of S. aureus 29213, a standard susceptibility strain, onto a large agar plate (150 mm) containing Mueller Hinton Agar as well as 1 μg/ml of the test compound. The presence of rifalazil or rifampin in these plates generally allowed for the growth of ˜50 colonies, all colonies representing a mutant sub-population or populations in the culture. Some compounds prevented the growth of any mutant colonies (mutant score of 2), while the presence of other compounds allowed the growth of <10 colonies (mutant score of 1). Most compounds failed to prevent the growth of mutant colonies on the plate (a mutant score of 0). The MICs of NCEs on agar plates were lower than MICs determined by growth in liquid broth. However, compounds that score 2 in this test consistently showed favorable low MICs against the mutant panel. This correlation provided additional confidence in the value and ranking of compounds by MIC testing of the mutant panel, as compounds having a score of 2 have tracked with strong activity in MIC testing against resistant strains, as indicated in Table 3.

### EXAMPLE 2

### In vitro Screening Using Mutant RpoB Polypeptides

[0086] Antimicrobial compounds may be identified by screening for interactions with mutated RpoB polypeptides in vitro. In one particular assay, various mutated RpoB polypeptides from S. aureus are immobilized in the wells of a multi-well plate such that each different mutant is present in its own well. A plurality of labeled candidate compounds are then individually contacted with each mutated RpoB polypeptide such that each candidate compound-polypeptide contacting event is segregated from the others. After a sufficient time to allow for binding, unbound compound is removed by washing and the presence of bound compound is determined by detection of the label. Candidate compounds that bind mutant RpoB polypeptides are thus identified.

[0087] In this example, compounds identified as binding RpoB are next optimally tested for their ability to reduce RNA polymerase activity. Each of the compounds identified as binding one or more RpoB polypeptides is incubated in a solution containing the folded beacon shown in FIG. 3 in the presence of various active bacterial RNA polymerases, each having a mutated RpoB polypeptide. As above, each RNA polymerase candidate compound is contacted with the polypeptide separately and distinctly from the other RNA polymerase candidate compounds. Functional RNA polymerase polypeptides bind the folded beacon and transcribe a short complementary RNA fragment, thereby causing the beacon to unfold and emit a fluorescent signal. Samples in which a fluorescent signal is emitted are considered to contain a functional RNA polymerase. Samples having a reduced signal (compared to an untreated control) are considered to contain a candidate compound having the ability to inhibit RNA polymerase activity. Candidate compounds that inhibit the biological activity of at least two mutated RNA polymerases are considered to be particularly desirable.

### EXAMPLE 3

### In vivo Screening of Rifamycin Derivatives

[0088] Antimicrobial compounds may also be screened in vivo using a mouse septicemia model. In one particular example, mice were inoculated with an S. aureus Smith strain (Weiss) encoding a mutated microbial polypeptide (e.g., a mutated RpoB). Compounds were administered either IV or orally 30 minutes following inoculation, and observations was continued for three days. Compounds that promoted the survival of inoculated mice were identified as being compounds that are effective against antibiotic-resistant forms of S. aureus.

[0089] In one example, when mutant strains derived from S. aureus Smith containing the RpoB H481Y alteration were inoculated in the mouse model by IV or oral route, two compounds, compound 15 and compound 16 from Table 3, were found to protect mice from lethality, relative to untreated animals (Table 4). The dose that was essential for efficacy was found to be considerably higher for the mutant strains than for the wild-type S. aureus Smith. This was accounted for by the increased MIC against these mutant strains compared with the wild-type strain (MICs of 2 μg/ml and 0.004-0.008 μg/ml, respectively). Similar results were observed for mutants containing the S486L and L466S mutations in RpoB, which also conferred strong resistance when tested by IV administration (Table 4).

[0090] According to our results, candidate compounds that showed significant MICs against mutant cells in culture also proved efficacious in vivo against mutant strains, whereas rifampin failed to be effective against mutant strains in vivo. These results demonstrate the efficacy of the screening assays of the present invention.

TABLE 4
In vivo efficacy in the mouse septicemia model utilizing S. aureus Smith strain
carrying the indicated mutation conferring strong resistance to rifampin

| | | No Drug | 1.1 × 10⁷ | 1.4 × 10⁷ | 1.1 × 10⁷ |
|---|---|---|---|---|---|
| | | Survival | CFU/mouse | CFU/mouse | CFU/mouse |
| | | (n = 10) | 0 | 0 | 0 |
| | | Dose | Survival | Survival | Survival |
| Compound | Delivery | (mg/kg) | (n = 5) | (n = 5) | (n = 5) |
| Rifampicin | IV | 20.0 | 0 | 1 | 0 |
| | | 6.0 | 0 | 0 | 0 |
| Ciprofloxacin | IV | 6.0 | 4 | 5 | 5 |
| | | 2.0 | 5 | 3 | 4 |
| | | 0.6 | 2 | 1 | 1 |
| Compound 15 | IV | 20.0 | 1 | 5 | 3 |
| | | 6.0 | 1 | 1 | 1 |
| Compound 16 | IV | 20.0 | 4 | 3 | 5 |
| | | 6.0 | 0 | 1 | 1 |
| Rifampicin | oral | 200.0 | 0 | nd | nd |
| Compound 15 | oral | 200.0 | 5 | nd | nd |

### OTHER EMBODIMENTS

[0091] All publications and patent applications cited in this specification are herein incorporated by reference as if each individual publication or patent application were specifically and individually indicated to be incorporated by reference. Although the foregoing invention has been described in some detail by way of illustration and example for purposes of clarity of understanding, it will be readily apparent to those of ordinary skill in the art in light of the teachings of this invention that certain changes and modifications may be made thereto without departing from the spirit or scope of the appended claims.

1. A method of identifying a compound that inhibits the growth of drug resistant microbial pathogens, said method comprising the steps of:
(a) producing a derivative compound of an antimicrobial compound;
(b) contacting said derivative compound with a plurality of mutated microbial polypeptides conferring drug resistance under conditions that ensure that each contacting event is segregated from the others; and
(c) determining whether said derivative compound interacts with said mutated microbial polypeptides, wherein a derivative compound that interacts with at least two different mutated microbial polypeptides is a compound that inhibits the growth of drug resistant microbial pathogens.

2. The method of claim 1, wherein said contacting occurs in a cell-free environment.

3. The method of claim 1, wherein said contacting occurs inside a microbial cell.

4. The method of claim 1, wherein said contacting occurs in or on an animal.

5. The method of claim 1, wherein said interaction is determined by determining whether said candidate compound reduces growth of said microbial cell

6. The method of claim 1, wherein an interaction is determined by determining the biological activity of said mutated microbial polypeptides, wherein a decrease in the level of said biological activity relative to the biological activity of mutated microbial polypeptides not contacted with said derivative compound, identifies said derivative compound as being a compound that inhibits the growth of drug resistant microbial pathogens.

7. The method of claim 1, wherein an interaction is determined by determining binding of said derivative compound to a mutated microbial polypeptide.

8. The method of claim 1, wherein said mutated microbial polypeptides are mutated RpoB polypeptides.

9. The method of claim 1, wherein said mutated microbial polypeptides are fusion polypeptides.

10. A method of identifying a compound that inhibits the growth of drug resistant microbial pathogens, said method comprising the steps of:
(a) contacting at least ten candidate compounds with a plurality of mutated microbial polypeptides conferring drug resistance, under conditions that ensure that each contacting event is segregated from the others; and
(b) determining whether said candidate compounds interact with said mutated microbial polypeptides, wherein a candidate compound that interacts with at least two different mutated microbial polypeptides is identified as a compound that inhibits the growth of drug resistant microbial pathogens.

11. The method of claim 10, wherein said interaction is determined by determining whether said candidate compound reduces growth of said microbial cell.

12. The method of claim 10, wherein an interaction is determined by determining the biological activity of said mutated microbial polypeptides, wherein a decrease in the level of said biological activity relative to the biological activity of mutated microbial polypeptides not contacted with said candidate compound, identifies said candidate compound as being a compound that inhibits the growth of drug resistant microbial pathogens.

13. The method of claim 10, wherein an interaction is determined by determining binding of said candidate compound to a mutated microbial polypeptide.

14. The method of claim 10, wherein said mutated microbial polypeptides are mutated RpoB polypeptides.

15. The method of claim 10, wherein said mutated microbial polypeptides are fusion polypeptides.

16. A method of identifying a compound that inhibits the growth of drug resistant microbial pathogens, said method comprising the steps of:
(a) contacting a candidate compound with a plurality of mutated microbial polypeptides conferring drug resistance under conditions that ensure that each contacting event is segregated from the others; and
(b) determining whether said candidate compound binds said mutated microbial polypeptides, wherein a candidate compound that binds at least two different mutated microbial polypeptides is a compound that inhibits the growth of drug resistant microbial pathogens.

17. The method of claim 16, wherein said mutated microbial polypeptides are mutated RpoB polypeptides.

18. The method of claim 16, wherein said mutated microbial polypeptides are fusion polypeptides.

19. A method of identifying a compound that inhibits the growth of drug resistant microbial pathogens, said method comprising the steps of:
(a) contacting a candidate compound with a plurality of mutated microbial polypeptides conferring drug resistance under conditions that ensure that each contacting event is segregated from the others; and
(b) determining in vitro whether said candidate compound reduces the biological activity of said mutated microbial polypeptides, wherein a candidate compound that reduces the biological activity of at least two different mutated microbial polypeptides relative to the biological activity of mutated microbial polypeptides not contacted with said candidate compound is identified as a compound that inhibits the growth of drug resistant microbial pathogens.

20. The method of claim 19, wherein said mutated microbial polypeptides are mutated RpoB polypeptides.

21. The method of claim 19, wherein said mutated microbial polypeptides are fusion polypeptides.

22. A method of identifying a compound that inhibits the growth of drug resistant microbial pathogens, said method comprising the steps of:
(a) contacting a candidate compound with a mutated microbial polypeptide conferring drug resistance in vitro;
(b) determining whether said candidate compound interacts with said mutated microbial polypeptide, and continuing to step (c) if said candidate compound interacts with said mutated microbial polypeptide;
(c) contacting said candidate compound identified in step (b) with a mutated microbial polypeptide in an animal; and
(d) determining whether said candidate compound interacts with said mutated microbial polypeptide in said animal, wherein a candidate compound that interacts with said mutated microbial polypeptide in said mammal is identified as a compound that inhibits the growth of drug resistant microbial pathogens.

23. The method of claim 22, wherein said mutated microbial polypeptides are mutated RpoB polypeptides.

24. The method of claim 22, wherein said mutated microbial polypeptides are fusion polypeptides.

25. A method of identifying a compound that inhibits the growth of drug resistant microbial pathogens, said method comprising the steps of:
(a) contacting a candidate compound with a mutated microbial polypeptide conferring drug resistance;
(b) determining whether said candidate compound interacts with said mutated microbial polypeptide and continuing to step (c) if a candidate compound is identified as having the ability to interact with said mutated microbial polypeptide;
(c) contacting said candidate compound identified in step (b) with a plurality of mutated microbial polypeptides conferring drug resistance under conditions that ensure that each contacting event is segregated from the others; and
(d) determining whether said candidate compound interacts with said mutated microbial polypeptides, wherein a candidate compound that interacts with at least two different mutated microbial polypeptides is identified as a compound that inhibits the growth of drug resistant microbial pathogens.

26. The method of claim 25, wherein said mutated microbial polypeptides are mutated RpoB polypeptides.

27. The method of claim 25, wherein said mutated microbial polypeptides are fusion polypeptides.

28. A surface comprising a plurality of mutated microbial polypeptides conferring drug resistance, wherein said mutated microbial polypeptides are arranged on said surface such that, when contacted with a candidate compound, each polypeptide-candidate compound contacting event is segregated from the others.

29. The surface of claim 28, wherein said polypeptides are immobilized on said surface.

30. The surface of claim 28, wherein said mutated microbial polypeptides are mutated RpoB polypeptides.

31 A plurality of chromatographic columns, wherein each column comprises a mutated microbial polypeptide conferring drug resistance immobilized on said column.

32. The plurality of chromatographic columns of claim 31, wherein said mutated microbial polypeptides are mutated RpoB polypeptides.

33. A method of measuring RNA polymerase biological activity, said method comprising the steps of:
(a) providing an oligonucleotide that has a stem region comprising a double stranded segment formed between two complementary nucleotide sequences under suitable conditions, wherein the formation of said double stranded segment reduces or inhibits the emission of fluorescence from said fluorophore and wherein said oligonucleotide is covalently linked to a quencher and a fluorophore, wherein said quencher is linked to the 5′ or 3′end of said oligonucleotide and wherein said fluorophore is linked to the other end; and
(b) contacting said oligonucleotide with a test sample under conditions allowing transcription of said oligonucleotide, wherein an RNA transcript produced by said transcription binds to one of the two nucleotide sequences in said double stranded segment, such that the emission of fluorescence from said fluorophore is increased;
(c) detecting the emission of fluorescence from said test sample relative to a control sample, wherein an increase in fluorescence emitted from said test sample identifies said test sample as containing RNA polymerase polypeptides having biological activity.

34. A method of identifying a compound that inhibits the growth of drug resistant microbial pathogens, said method comprising the steps of:
(a) contacting a candidate compound with a mutated RpoB polypeptide conferring drug resistance and an oligonucleotide that has a stem region comprising a double stranded segment formed between two complementary nucleotide sequences under suitable conditions, wherein the formation of said double stranded segment reduces or inhibits the emission of fluorescence from said fluorophore and wherein said oligonucleotide is covalently linked to a quencher and a fluorophore, wherein said quencher is linked to the 5′ or 3′end of said oligonucleotide and wherein said fluorophore is linked to the other end and wherein said contacting occurs under conditions that allow transcription of said oligonucleotide, wherein an RNA transcript produced by said transcription binds to one of the two nucleotide sequences in said double stranded segment, such that the emission of fluorescence from said fluorophore is increased
(b) detecting the emission of fluorescence from said contacting event relative to an untreated control, wherein a decrease in fluorescence emitted from said contacting event identifies said candidate compound as having the ability to reduce RNA polymerase biological activity, thereby identifying said candidate compound as being a compound that inhibits the growth of drug resistant microbial pathogens.

35. A method of identifying a compound that inhibits the growth of drug resistant microbial pathogens, said method comprising the steps of:
(a) contacting a candidate compound with a plurality of mutated RpoB polypeptides conferring drug resistance and an oligonucleotide that has a stem region comprising a double stranded segment formed between two complementary nucleotide sequences under suitable conditions, wherein the formation of said double stranded segment reduces or inhibits the emission of fluorescence from said fluorophore and wherein said oligonucleotide is covalently linked to a quencher and a fluorophore, wherein said quencher is linked to the 5′ or 3′end of said oligonucleotide and wherein said fluorophore is linked to the other end and wherein said contacting occurs under conditions that ensure that each contacting event is segregated from the others and under conditions that allow transcription of said oligonucleotide, wherein an RNA transcript produced by said transcription binds to one of the two nucleotide sequences in said double stranded segment, such that the emission of fluorescence from said fluorophore is increased;
(b) detecting the emission of fluorescence from each contacting event relative to a corresponding untreated control, wherein a decrease in fluorescence emitted from at least two of said contacting events identifies said candidate compound as having the ability to reduce RNA polymerase biological activity, thereby identifying said candidate compound as being a compound that inhibits the growth of drug resistant microbial pathogens.

The application's sequence listing, which the Patent Office published only in electronic form, follows.

SEQUENCE LISTING (55 sequences)

SEQ ID NO: 1 - protein, 1119 aa, T. aquaticus
MEIKRFGRIREVIPLPPLTEIQVESYKKALQADVPPEKRENVGIQAAFKETFPIEEGDKGKGGLVLDFLEYRIGDPPFSQDECREKDLTYQAPLYARLQLIHKDTGLIKEDEVFLGHLPLMTEDGSFIINGADRVIVSQIHRSPGVYFTPDPARPGRYIASIIPLPKRGPWIDLEVEASGVVTMKVNKRKFPLVLLLRVLGYDQETLVRELSAYGDLVQGLLDEAVLAMRPEEAMVRLFTLLRPGDPPKKDKALAYLFGLLADPKRYDLGEAGRYKAEEKLGVGLSGRTLVRFEDGEFKDEVFLPTLRYLFALTAGVPGHEVDDIDHLGNRRIRTVGELMADQFRVGLARLARGVRERMVMGSPDTLTPAKLVNSRPLEAALREFFSRSQLSQFKDETNPLSSLRHKRRISALGPGGLTRERAGFDVRDVHRTHYGRICPVETPEGANIGLITSLAAYARVDALGFIRTPYRRVKNGVVTEEVVYMTASEEDRYTIAQANTPLEGDRIATDRVVARRRGEPVIVAPEEVEFMDVSPKQVFSLNTNLIPFLEHDDANRALMGSNMQTQAVPLIRAQAPVVMTGLEERVVRDSLAALYAEEDGEVVKVDGTRIAVRYEDGRLVEHPLRRYARSNQGTAFDQRPRVRVGQRVKKGDLLADGPASEEGFLALGQNVLVAIMPFDGYNFEDAIVISEELLKRDFYTSIHIERYEIEARDTKLGPERITRDIPHLSEAALRDLDEEGIVRIGAEVKPGDILVGRTSFKGEQEPSPEERLLRSIFGEKARDVKDTSLRVPPGEGGIVVGRLRLRRGDPGVELKPGVREVVRVFVAQKRKLQVGDKLANRHGNKGVVAKILPVEDMPHLPDGTPVDVILNPLGVPSRMNLGQILETHLGLAGYFLGQRYISPVFDGATEPEIKELLAEAFNLYFGKRQGEGFGVDKREKEVLARAEKLGLVSPGKSPEEQLKELFDLGKVVLYDGRTGEPFEGPIVVGQMFIMKLYHMVEDKMHARSTGPYSLITQQPLGGKAQFGGQRFGEMEVWALEAYGAAHTLQEMLTIKSDDIEGRNAAYQAIIKGEDVPEPSVPESFRVLVKELQALALDVQTLDEKDNPVDIFEGLASKR

SEQ ID NO: 2 - protein, 1342 aa, E. coli [sequence omitted]

SEQ ID NO: 3 - protein, 1342 aa, E. coli
MVYSYTEKKRIRKDFGKRPQVLDVPYLLSIQLDSFQKFIEQDPEGQYGLEAAFRSVFPIQSYSGNSELQYVSYRLGEPVFDVQECQIRGVTYSAPLRVKLRLVIYEREAPEGTVKDIKEQEVYMGEIPLMTDNGTFVINGTERFIVSQLHRSPGVFFDSDKGKTHSSGKVLYNARIIPYRGSWLDFEFDPKDNLFVRIDRRRKLPATIILRALNYTTEQILDLFFEKVIFEIRDNKLQMELVPERLRGETASFDIEANGKVYVEKGRRITARHIRQLEKDDVKLIEVPVEYIAGKVVAKDYIDESTGELICAANMELSLDLLAKLSQSGHKRIETLFTNDLDHGPYISETLRVDPTNDRLSALVEIYRMMRPGEPPTREAAESLFENLFFSEDRYDLSAVGRMKFNRSLLREEIEGSGILSKDDIIDVMKKLIDIRNGKGEVDDIDHLGNRRIRSVGEMAENQFRVGLVRVERAVKERLSLGDLDTLMPQDMINAKPISAAVKEFFGSSQLSRFMYQNNPLSEITQKRHIFAPDPGGLTRERAGFEVRDVHPTHYGRVCPIEPLEGPNIGLFNFLSVYAQTNEYGFLETPYRKVTDGVVTDEIHYLSAIEEGNYVIAQANSNLDEEGHFVEDLVTCRSKGESSLFSRDQVDYMDVSTQQVVSVGASLIPFLEHDDANRALMGANMQRQAVPTLRADKPLVGTGMERAVAVDSGVTAVAKRGGVVQYVDASRIVIKVNEDEMYPGEAGIDIYNLTKYTRSNQNTCINQMPCVSLGEPVERGDVLADGPSTDLGELALGQNMRVAFMPWNGYNFEDSILVSERVVQEDRFTTIHIQELACVSRDTKLGPEEITADIPNVGEAALSKLDESGIVYIGAEVTGGDILVGKVTPKGETQLTPEEKLLRAIFGEKASDVKDSSLRVPNGVSGTVIDVQVFTRDGVEKDKRALEIEEMQLKQAKKDLSEELQILEAGLFSRIRAVLVAGGVEAEKLDKLPRDRWLELGLTDEEKQNQLEQLAEQYDELKHEFEKKLEAKRRKITQGDDLAPGVLKIVKVYLAVKRRIQPGDKMAGRHGNKGVISKINPIEDMPYDENGTPVDIVLNPLGVPSRMNIGQILETHLGMAAKGIGDKINAMLKQQQEVAKLREFIQRAYDLGADVRQKVDLSTFSDEEVMRLAENLRKGMPIATPVFDGAKEAEIKELLKLGDLPTSGQIRLYDGRTGEQFERPVTVGYMYMLKLNHLVDDKMHARSTGSYSLVTQQPLGGKAQFGGQRFGEMEVWALEAYGAAYTLQEMLTVKSDDVNGRTKMYKNIVDGNHQMEPGMPESFNVLLKEIRSLGINIELEDE

SEQ ID NO: 4 - protein, 1342 aa, E. coli
MVYSYTEKKRIRKDFGKRPQVLDVPYLLSIQLDSFQKFIEQDPEGQYGLEAAFRSVFPIQSYSGNSELQYVSYRLGEPVFDVQECQIRGVTYSAPLRVKLRLVIYEREAPEGTVKDIKEQEVYMGEIPLMTDNGTFVINGTERVIVSQLHRSPGVFFDSDKGKTHSSGKVLYNARIIPYRGSWLDFEFDPKDNLFVRIDRRRKLPATIILRALNYTTEQILDLFFEKVIFEIRDNKLQMELVPERLRGETASFDIEANGKVYVEKGRRITARHIRQLEKDDVKLIEVPVEYIAGKVVAKDYIDESTGELICAANMELSLDLLAKLSQSGHKRIETLFTNDLDHGPYISETLRVDPTNDRLSALVEIYRMMRPGEPPTREAAESLFENLFFSEDRYDLSAVGRMKFNRSLLREEIEGSGILSKDDIIDVMKKLIDIRNGKGEVDDIDHLGNRRIRSVGEMAENQFRVGLVRVERAVKERLSLGDLDTLMPQDMINAKPISAAVKEFFVSSQLPPFMNQNNSLFEITRKRLIYALGPGGLTRERAGFEVRDVHPTHYGRVCPIETPEGPNIGLINSLSVYAQTNEYGFLETPYRKVTDGVVTDEIHYLSAIEEGNYVIAQANSNLDEEGHFVEDLVTCRSKGESSLFSRDQVDYMDVSTQQVVSVGASLIPFLEHDDANRALMGANMQRQAVPTLRADKPLVGTGMERAVAVDSGVTAVAKRGGVVQYVDASRIVIKVNEDEMYPGEAGIDIYNLTKYTRSNQNTCINQMPCVSLGEPVERGDVLADGPSTDLGELALGQNMRVAFMPWNGYNFEDSILVSERVVQEDRFTTIHIQELACVSRDTKLGPEEITADIPNVGEAALSKLDESGIVYIGAEVTGGDILVGKVTPKGETQLTPEEKLLRAIFGEKASDVKDSSLRVPNGVSGTVIDVQVFTRDGVEKDKRALEIEEMQLKQAKKDLSEELQILEAGLFSRIRAVLVAGGVEAEKLDKLPRDRWLELGLTDEEKQNQLEQLAEQYDELKHEFEKKLEAKRRKITQGDDLAPGVLKIVKVYLAVKRRIQPGDKMAGRHGNKGVISKINPIEDMPYDENGTPVDIVLNPLGVPSRMNIGQILETHLGMAAKGIGDKINAMLKQQQEVAKLREFIQRAYDLGADVRQKVDLSTFSDEEVMRLAENLRKGMPIATPVFDGAKEAEIKELLKLGDLPTSGQIRLYDGRTGEQFERPVTVGYMYMLKLNHLVDDKMHARSTGSYSLVTQQPLGGKAQFGGQRFGEMEVWALEAYGAAYTLQEMLTVKSDDVNGRTKMYKNIVDGNHQMEPGMPESFNVLLKEIRSLGINIELEDE

SEQ ID NO: 5 - protein, 1342 aa, E. coli
MVYSYTEKKRIRKDFGKRPQVLDVPYLLSIQLDSFQKFIEQDPEGQYGLEAAFRSVFPIQSYSGNSELQYVSYRLGEPVFDVQECQIRGVTYSAPLRVKLRLVIYEREAPEGTVKDIKEQEVYMGEIPLMTDNGTFVINGTERVIVSQLHRSPGVFFDSDKGKTHSSGKVLYNARIIPYRGSWLDFEFDPKDNLFVRIDRRRKLPATIILRALNYTTEQILDLFFEKVIFEIRDNKLQMELVPERLRGETASFDIEANGKVYVEKGRRITARHIRQLEKDDVKLIEVPVEYIAGKVVAKDYIDESTGELICAANMELSLDLLAKLSQSGHKRIETLFTNDLDHGPYISETLRVDPTNDRLSALVEIYRMMRPGEPPTREAAESLFENLFFSEDRYDLSAVGRMKFNRSLLREEIEGSGILSKDDIIDVMKKLIDIRNGKGEVDDIDHLGNRRIRSVGEMAENQFRVGLVRVERAVKERLSLGDLDTLMPQDMINAKPISAAVKEFFGSSQLFLFMVQNNPLSEITPKRCISALGPGGLTRERAGFEVRDVHPTHYGRVCPIETPEGPNIGLINSLSVYAQTNEYGFLETPYRKVTDGVVTDEIHYLSAIEEGNYVIAQANSNLDEEGHFVEDLVTCRSKGESSLFSRDQVDYMDVSTQQVVSVGASLIPFLEHDDANRALMGANMQRQAVPTLRADKPLVGTGMERAVAVDSGVTAVAKRGGVVQYVDASRIVIKVNEDEMYPGEAGIDIYNLTKYTRSNQNTCINQMPCVSLGEPVERGDVLADGPSTDLGELALGQNMRVAFMPWNGYNFEDSILVSERVVQEDRFTTIHIQELACVSRDTKLGPEEITADIPNVGEAALSKLDESGIVYIGAEVTGGDILVGKVTPKGETQLTPEEKLLRAIFGEKASDVKDSSLRVPNGVSGTVIDVQVFTRDGVEKDKRALEIEEMQLKQAKKDLSEELQILEAGLFSRIRAVLVAGGVEAEKLDKLPRDRWLELGLTDEEKQNQLEQLAEQYDELKHEFEKKLEAKRRKITQGDDLAPGVLKIVKVYLAVKRRIQPGDKMAGRHGNKGVISKINPIEDMPYDENGTPVDIVLNPLGVPSRMNIGQILETHLGMAAKGIGDKINAMLKQQQEVAKLREFIQRAYDLGADVRQKVDLSTFSDEEVMRLAENLRKGMPIATPVFDGAKEAEIKELLKLGDLPTSGQIRLYDGRTGEQFERPVTVGYMYMLKLNHLVDDKMHARSTGSYSLVTQQPLGGKAQFGGQRFGEMEVWALEAYGAAYTLQEMLTVKSDDVNGRTKMYKNIVDGNHQMEPGMPESFNVLLKEIRSLGINIELEDE

SEQ ID NO: 6 - protein, 1342 aa, E. coli
MVYSYTEKKRIRKDFGKRPQVLDVPYLLSIQLDSFQKFIEQDPEGQYGLEAAFRSVFPIQSYSGNSELQYVSYRLGEPVFDVQECQIRGVTYSAPLRVKLRLVIYEREAPEGTVKDIKEQEVYMGEIPLMTDNGTFVINGTERVIVSQLHRSPGVFFDSDKGKTHSSGKVLYNARIIPYRGSWLDFEFDPKDNLFVRIDRRRKLPATIILRALNYTTEQILDLFFEKVIFEIRDNKLQMELVPERLRGETASFDIEANGKVYVEKGRRITARHIRQLEKDDVKLIEVPVEYIAGKVVAKDYIDESTGELICAANMELSLDLLAKLSQSGHKRIETLFTNDLDHGPYISETLRVDPTNDRLSALVEIYRMMRPGEPPTREAAESLFENLFFSEDRYDLSAVGRMKFNRSLLREEIEGSGILSKDDIIDVMKKLIDIRNGKGEVDDIDHLGNRRIRSVGEMAENQFRVGLVRVERAVKERLSLGDLDTLMPQDMINAKPISAAVKEFFGSSQLSQFMGQNNPLSEITYKRSISALGPGGLTRERAGFEVRDVHPTHYGRVCPIETPEGPNIGLINSLSVYAQTNEYGFLETPYRKVTDGVVTDEIHYLSAIEEGNYVIAQANSNLDEEGHFVEDLVTCRSKGESSLFSRDQVDYMDVSTQQVVSVGASLIPFLEHDDANRALMGANMQRQAVPTLRADKPLVGTGMERAVAVDSGVTAVAKRGGVVQYVDASRIVIKVNEDEMYPGEAGIDIYNLTKYTRSNQNTCINQMPCVSLGEPVERGDVLADGPSTDLGELALGQNMRVAFMPWNGYNFEDSILVSERVVQEDRFTTIHIQELACVSRDTKLGPEEITADIPNVGEAALSKLDESGIVYIGAEVTGGDILVGKVTPKGETQLTPEEKLLRAIFGEKASDVKDSSLRVPNGVSGTVIDVQVFTRDGVEKDKRALEIEEMQLKQAKKDLSEELQILEAGLFSRIRAVLVAGGVEAEKLDKLPRDRWLELGLTDEEKQNQLEQLAEQYDELKHEFEKKLEAKRRKITQGDDLAPGVLKIVKVYLAVKRRIQPGDKMAGRHGNKGVISKINPIEDMPYDENGTPVDIVLNPLGVPSRMNIGQILETHLGMAAKGIGDKINAMLKQQQEVAKLREFIQRAYDLGADVRQKVDLSTFSDEEVMRLAENLRKGMPIATPVFDGAKEAEIKELLKLGDLPTSGQIRLYDGRTGEQFERPVTVGYMYMLKLNHLVDDKMHARSTGSYSLVTQQPLGGKAQFGGQRFGEMEVWALEAYGAAYTLQEMLTVKSDDVNGRTKMYKNIVDGNHQMEPGMPESFNVLLKEIRSLGINIELEDE

SEQ ID NO: 7 - protein, 1178 aa, M. tuberculosis
MLEGCILADSRQSKTAASPSPSRPQSSSNNSVPGAPNRVSFAKLREPLEVPGLLDVQTDSFEWLIGSPRWRESAAERGDVNPVGGLEEVLYELSPIEDFSGSMSLSFSDPRFDDVKAPVDECKDKDMTYAAPLFVTAEFINNNTGEIKSQTVFMGDFPMMTEKGTFIINGTERVVVSQLVRSPGVYFDETIDKSTDKTLHSVKVIPSRGAWLEFDVDKRDTVGVRIDRKRRQPVTVLLKALGWTSEQIVERFGFSEIMRSTLEKDNTVGTDEALLDIYRKLRPGEPPTKESAQTLLENLFFKEKRYDLARVGRYKVNKKLGLHVGEPITSSTLTEEDVVATIEYLVRLHEGQTTMTVPGGVEVPVETDDIDHFGNRRLRTVGELIQNQIRVGMSRMERVVRERMTTQDVEAITPQTLINIRPVVAAIKEFFGTSQLSQFMDQNNPLSGLTHKRRLSALGPGGLSRERAGLEVRDVHPSHYGRMCPIETPEGPNIGLIGSLSVYARVNPFGFIETPYRKVVDGVVSDEIVYLTADEEDRHVVAQANSPIDADGRFVEPRVLVRRKAGEVEYVPSSEVDYMDVSPRQMVSVATAMIPFLEHDDANRALMGANMQRQAVPLVRSEAPLVGTGMELRAAIDAGDVVVAEESGVIEEVSADYITVMHDNGTRRTYRMRKFARSNHGTCANQCPIVDAGDRVEAGQVIADGPCTDDGEMALGKNLLVAIMPWEGHNYEDAIILSNRLVEEDVLTSIHIEEHEIDARDTKLGAEEITRDIPNISDEVLADLDERGIVRIGAEVRDGDILVGKVTPKGETELTPEERLLRAIFGEKAREVRDTSLKVPHGESGKVIGIRVFSREDEDELPAGVNELVRVYVAQKRKISDGDKLAGRHGNKGVIGKILPVEDMPFLADGTPVDIILNTHGVPRRMNIGQILETHLGWCAHSGWKVDAAKGVPDWAARLPDELLEAQPNAIVSTPVFDGAQEAELQGLLSCTLPNRDGDVLVDADGKAMLFDGRSGEPFPYPVTVGYMYIMKLHHLVDDKIHARSTGPYSMITQQPLGGKAQFGGQRFGEMECWAMQAYGAAYTLQELLTIKSDDTVGRVKVYEAIVKGENIPEPGIPESFKVLLKELQSLCLNVEVLSSDGAAIELREGEDEDLERAAANLGINLSRNESASVEDLA

SEQ ID NO: 8 - protein, 1178 aa, M. tuberculosis
MLEGCILADSRQSKTAASPSPSRPQSSSNNSVPGAPNRVSFAKLREPLEVPGLLDVQTDSFEWLIGSPRWRESAAERGDVNPVGGLEEVLYELSPIEDFSGSMSLSFSDPRFDDVKAPVDECKDKDMTYAAPLFVTAEFINNNTGEIKSQTVFMGDFPMMTEKGTFIINGTERVFVSQLVRSPGVYFDETIDKSTDKTLHSVKVIPSRGAWLEFDVDKRDTVGVRIDRKRRQPVTVLLKALGWTSEQIVERFGFSEIMRSTLEKDNTVGTDEALLDIYRKLRPGEPPTKESAQTLLENLFFKEKRYDLARVGRYKVNKKLGLHVGEPITSSTLTEEDVVATIEYLVRLHEGQTTMTVPGGVEVPVETDDIDHFGNRRLRTVGELIQNQIRVGMSRMERVVRERMTTQDVEAITPQTLINIRPVVAAIKEFFDTSHPTLLIVQHNPMLGLCYTRRLLAPGPGGLSRERAGLEVRDVHPSHYGRMCPIETPEGPNIGLIGSLSVYARVNPFGFIETPYRKVVDGVVSDEIVYLTADEEDRHVVAQANSPIDADGRFVEPRVLVRRKAGEVEYVPSSEVDYMDVSPRQMVSVATAMIPFLEHDDANRALMGANMQRQAVPLVRSEAPLVGTGMELRAAIDAGDVVVAEESGVIEEVSADYITVMHDNGTRRTYRMRKFARSNHGTCANQCPIVDAGDRVEAGQVIADGPCTDDGEMALGKNLLVAIMPWEGHNYEDAIILSNRLVEEDVLTSIHIEEHEIDARDTKLGAEEITRDIPNISDEVLADLDERGIVRIGAEVRDGDILVGKVTPKGETELTPEERLLRAIFGEKAREVRDTSLKVPHGESGKVIGIRVFSREDEDELPAGVNELVRVYVAQKRKISDGDKLAGRHGNKGVIGKILPVEDMPFLADGTPVDIILNTHGVPRRMNIGQILETHLGWCAHSGWKVDAAKGVPDWAARLPDELLEAQPNAIVSTPVFDGAQEAELQGLLSCTLPNRDGDVLVDADGKAMLFDGRSGEPFPYPVTVGYMYIMKLHHLVDDKIHARSTGPYSMITQQPLGGKAQFGGQRFGEMECWAMQAYGAAYTLQELLTIKSDDTVGRVKVYEAIVKGENIPEPGIPESFKVLLKELQSLCLNVEVLSSDGAAIELREGEDEDLERAAANLGINLSRNESASVEDLA

SEQ ID NO: 9 - protein, 1178 aa, M. tuberculosis
MLEGCILADSRQSKTAASPSPSRPQSSSNNSVPGAPNRVSFAKLREPLEVPGLLDVQTDSFEWLIGSPRWRESAAERGDVNPVGGLEEVLYELSPIEDFSGSMSLSFSDPRFDDVKAPVDECKDKDMTYAAPLFVTAEFINNNTGEIKSQTVFMGDFPMMTEKGTFIINGTERVVVSQLVRSPGVYFDETIDKSTDKTLHSVKVIPSRGAWLEFDVDKRDTVGVRIDRKRRQPVTVLLKALGWTSEQIVERFGFSEIMRSTLEKDNTVGTDEALLDIYRKLRPGEPPTKESAQTLLENLFFKEKRYDLARVGRYKVNKKLGLHVGEPITSSTLTEEDVVATIEYLVRLHEGQTTMTVPGGVEVPVETDDIDHFGNRRLRTVGELIQNQIRVGMSRMERVVRERMTTQDVEAITPQTLINIRPVVAAIKEFFGTSQRSKFVYQNNPLSGLGDQRRLWALGPGGLSRERAGLEVRDVHPSHYGRMCPIETPEGPNIGLIGSLSVYARVNPFGFIETPYRKVVDGVVSDEIVYLTADEEDRHVVAQANSPIDADGRFVEPRVLVRRKAGEVEYVPSSEVDYMDVSPRQMVSVATAMIPFLEHDDANRALMGANMQRQAVPLVRSEAPLVGTGMELRAAIDAGDVVVAEESGVIEEVSADYITVMHDNGTRRTYRMRKFARSNHGTCANQCPIVDAGDRVEAGQVIADGPCTDDGEMALGKNLLVAIMPWEGHNYEDAIILSNRLVEEDVLTSIHIEEHEIDARDTKLGAEEITRDIPNISDEVLADLDERGIVRIGAEVRDGDILVGKVTPKGETELTPEERLLRAIFGEKAREVRDTSLKVPHGESGKVIGIRVFSREDEDELPAGVNELVRVYVAQKRKISDGDKLAGRHGNKGVIGKILPVEDMPFLADGTPVDIILNTHGVPRRMNIGQILETHLGWCAHSGWKVDAAKGVPDWAARLPDELLEAQPNAIVSTPVFDGAQEAELQGLLSCTLPNRDGDVLVDADGKAMLFDGRSGEPFPYPVTVGYMYIMKLHHLVDDKIHARSTGPYSMITQQPLGGKAQFGGQRFGEMECWAMQAYGAAYTLQELLTIKSDDTVGRVKVYEAIVKGENIPEPGIPESFKVLLKELQSLCLNVEVLSSDGAAIELREGEDEDLERAAANLGINLSRNESASVEDLA

SEQ ID NO: 10 - protein, 1178 aa, M. tuberculosis
MLEGCILADSRQSKTAASPSPSRPQSSSNNSVPGAPNRVSFAKLREPLEVPGLLDVQTDSFEWLIGSPRWRESAAERGDVNPVGGLEEVLYELSPIEDFSGSMSLSFSDPRFDDVKAPVDECKDKDMTYAAPLFVTAEFINNNTGEIKSQTVFMGDFPMMTEKGTFIINGTERVVVSQLVRSPGVYFDETIDKSTDKTLHSVKVIPSRGAWLEFDVDKRDTVGVRIDRKRRQPVTVLLKALGWTSEQIVERFGFSEIMRSTLEKDNTVGTDEALLDIYRKLRPGEPPTKESAQTLLENLFFKEKRYDLARVGRYKVNKKLGLHVGEPITSSTLTEEDVVATIEYLVRLHEGQTTMTVPGGVEVPVETDDIDHFGNRRLRTVGELIQNQIRVGMSRMERVVRERMTTQDVEAITPQTLINIRPVVAAIKEFFGTSQLSPFMEQNNPLSGLNRERRLCALGPGGLSRERAGLEVRDVHPSHYGRMCPIETPEGPNIGLIGSLSVYARVNPFGFIETPYRKVVDGVVSDEIVYLTADEEDRHVVAQANSPIDADGRFVEPRVLVRRKAGEVEYVPSSEVDYMDVSPRQMVSVATAMIPFLEHDDANRALMGANMQRQAVPLVRSEAPLVGTGMELRAAIDAGDVVVAEESGVIEEVSADYITVMHDNGTRRTYRMRKFARSNHGTCANQCPIVDAGDRVEAGQVIADGPCTDDGEMALGKNLLVAIMPWEGHNYEDAIILSNRLVEEDVLTSIHIEEHEIDARDTKLGAEEITRDIPNISDEVLADLDERGIVRIGAEVRDGDILVGKVTPKGETELTPEERLLRAIFGEKAREVRDTSLKVPHGESGKVIGIRVFSREDEDELPAGVNELVRVYVAQKRKISDGDKLAGRHGNKGVIGKILPVEDMPFLADGTPVDIILNTHGVPRRMNIGQILETHLGWCAHSGWKVDAAKGVPDWAARLPDELLEAQPNAIVSTPVFDGAQEAELQGLLSCTLPNRDGDVLVDADGKAMLFDGRSGEPFPYPVTVGYMYIMKLHHLVDDKIHARSTGPYSMITQQPLGGKAQFGGQRFGEMECWAMQAYGAAYTLQELLTIKSDDTVGRVKVYEAIVKGENIPEPGIPESFKVLLKELQSLCLNVEVLSSDGAAIELREGEDEDLERAAANLGINLSRNESASVEDLA

SEQ ID NO: 11 - protein, 1178 aa, M. tuberculosis
MLEGCILADSRQSKTAASPSPSRPQSSSNNSVPGAPNRVSFAKLREPLEVPGLLDVQTDSFEWLIGSPRWRESAAERGDVNPVGGLEEVLYELSPIEDFSGSMSLSFSDPRFDDVKAPVDECKDKDMTYAAPLFVTAEFINNNTGEIKSQTVFMGDFPMMTEKGTFIINGTERVVVSQLVRSPGVYFDETIDKSTDKTLHSVKVIPSRGAWLEFDVDKRDTVGVRIDRKRRQPVTVLLKALGWTSEQIVERFGFSEIMRSTLEKDNTVGTDEALLDIYRKLRPGEPPTKESAQTLLENLFFKEKRYDLARVGRYKVNKKLGLHVGEPITSSTLTEEDVVATIEYLVRLHEGQTTMTVPGGVEVPVETDDIDHFGNRRLRTVGELIQNQIRVGMSRMERVVRERMTTQDVEAITPQTLINIRPVVAAIKEFFGTSQLSQFMGQNNPLSGLTLKRRLQALGPGGLSRERAGLEVRDVHPSHYGRMCPIETPEGPNIGLIGSLSVYARVNPFGFIETPYRKVVDGVVSDEIVYLTADEEDRHVVAQANSPIDADGRFVEPRVLVRRKAGEVEYVPSSEVDYMDVSPRQMVSVATAMIPFLEHDDANRALMGANMQRQAVPLVRSEAPLVGTGMELRAAIDAGDVVVAEESGVIEEVSADYITVMHDNGTRRTYRMRKFARSNHGTCANQCPIVDAGDRVEAGQVIADGPCTDDGEMALGKNLLVAIMPWEGHNYEDAIILSNRLVEEDVLTSIHIEEHEIDARDTKLGAEEITRDIPNISDEVLADLDERGIVRIGAEVRDGDILVGKVTPKGETELTPEERLLRAIFGEKAREVRDTSLKVPHGESGKVIGIRVFSREDEDELPAGVNELVRVYVAQKRKISDGDKLAGRHGNKGVIGKILPVEDMPFLADGTPVDIILNTHGVPRRMNIGQILETHLGWCAHSGWKVDAAKGVPDWAARLPDELLEAQPNAIVSTPVFDGAQEAELQGLLSCTLPNRDGDVLVDADGKAMLFDGRSGEPFPYPVTVGYMYIMKLHHLVDDKIHARSTGPYSMITQQPLGGKAQFGGQRFGEMECWAMQAYGAAYTLQELLTIKSDDTVGRVKVYEAIVKGENIPEPGIPESFKVLLKELQSLCLNVEVLSSDGAAIELREGEDEDLERAAANLGINLSRNESASVEDLA

SEQ ID NO: 12 - protein, 1178 aa, M. tuberculosis
MLEGCILADSRQSKTAASPSPSRPQSSSNNSVPGAPNRVSFAKLREPLEVPGLLDVQTDSFEWLIGSPRWRESAAERGDVNPVGGLEEVLYELSPIEDFSGSMSLSFSDPRFDDVKAPVDECKDKDMTYAAPLFVTAEFINNNTGEIKSQTVFMGDFPMMTEKGTFIINGTERVVVSQLVRSPGVYFDETIDKSTDKTLHSVKVIPSRGAWLEFDVDKRDTVGVRIDRKRRQPVTVLLKALGWTSEQIVERFGFSEIMRSTLEKDNTVGTDEALLDIYRKLRPGEPPTKESAQTLLENLFFKEKRYDLARVGRYKVNKKLGLHVGEPITSSTLTEEDVVATIEYLVRLHEGQTTMTVPGGVEVPVETDDIDHFGNRRLRTVGELIQNQIRVGMSRMERVVRERMTTQDVEAITPQTLINIRPVVAAIKEFFGTSQLSQFMAQNNPLSGLTPKRRLYALGPGGLSRERAGLEVRDVHPSHYGRMCPIETPEGPNIGLIGSLSVYARVNPFGFIETPYRKVVDGVVSDEIVYLTADEEDRHVVAQANSPIDADGRFVEPRVLVRRKAGEVEYVPSSEVDYMDVSPRQMVSVATAMIPFLEHDDANRALMGANMQRQAVPLVRSEAPLVGTGMELRAAIDAGDVVVAEESGVIEEVSADYITVMHDNGTRRTYRMRKFARSNHGTCANQCPIVDAGDRVEAGQVIADGPCTDDGEMALGKNLLVAIMPWEGHNYEDAIILSNRLVEEDVLTSIHIEEHEIDARDTKLGAEEITRDIPNISDEVLADLDERGIVRIGAEVRDGDILVGKVTPKGETELTPEERLLRAIFGEKAREVRDTSLKVPHGESGKVIGIRVFSREDEDELPAGVNELVRVYVAQKRKISDGDKLAGRHGNKGVIGKILPVEDMPFLADGTPVDIILNTHGVPRRMNIGQILETHLGWCAHSGWKVDAAKGVPDWAARLPDELLEAQPNAIVSTPVFDGAQEAELQGLLSCTLPNRDGDVLVDADGKAMLFDGRSGEPFPYPVTVGYMYIMKLHHLVDDKIHARSTGPYSMITQQPLGGKAQFGGQRFGEMECWAMQAYGAAYTLQELLTIKSDDTVGRVKVYEAIVKGENIPEPGIPESFKVLLKELQSLCLNVEVLSSDGAAIELREGEDEDLERAAANLGINLSRNESASVEDLA

SEQ ID NO: 13 - protein, 1183 aa, S. aureus
MAGQVVQYGRHRKRRNYARISEVLELPNLIEIQTKSYEWFLREGLIEMFRDISPIEDFTGNLSLEFVDYRLGEPKYDLEESKNRDATYAAPLRVKVRLIIKETGEVKEQEVFMGDFPLMTDTGTFVINGAERVIVSQLVRSPSVYFNEKIDKNGRENYDATIIPNRGAWLEYETDAKDVVYVRIDRTRKLPLTVLLRALGFSSDQEIVDLLGDNEYLRNTLEKDGTENTEQALLEIYERLRPGEPPTVENAKSLLYSRFFDPKRYDLASVGRYKTNKKLHLKHRLFNQKLAEPIVNTETGEIVVEEGTVLDRRKIDEIMDVLESNANSEVFELHGSVIDEPVEIQSIKVYVPNDDEGRTTTVIGNAFPDSEVKCITPADIIASMSYFFNLLSGIGYTDDIDHLGNRRLRSVGELLQNQFRIGLSRMERVVRERMSIQDTESITPQQLINIRPVIASIKEFFGSSQLSQFMDQANPLAELTHKRRLSALGPGGLTRERAQMEVRDVHYSHYGRMCPIETPEGPNIGLINSLSSYARVNEFGFIETPYRKVDLDTHAITDQIDYLTADEEDSYVVAQANSKLDENGRFMDDEVVCRFRGNNTVMAKEKMDYMDVSPKQVVSAATACIPFLENDDSNRALMGANMQRQAVPLMNPEAPFVGTGMEHVAARDSGAAITAKHRGRVEHVESNEILVRRLVEENGVEHEGELDRYPLAKFKRSNSGTCYNQRPIVAVGDVVEYNEILADGPSMELGEMALGRNVVVGFMTWDGYNYEDAVIMSERLVKDDVYTSIHIEEYESEARDTKLGPEEITRDIPNVSESALKNLDDRGIVYIGAEVKDGDILVGKVTPKGVTELTAEERLLHAIFGEKAREVRDTSLRVPHGAGGIVLDVKVFNREEGDDTLSPGVNQLVRVYIVQKRKIHVGDKMCGRHGNKGVISKIVPEEDMPYLPDGRPIDIMLNPLGVPSRMNIGQVLELHLGMAAKNLGIHVASPVFDGANDDDVWSTIEEAGMARDGKTVLYDGRTGEPFDNRISVGVMYMLKLAHMVDDKLHARSTGPYSLVTQQPLGGKAQFGGQRFGEMEVWALEAYGAAYTLQEILTYKSDDTVGRVKTYEAIVKGENISRPSVPESFRVLMKELQSLGLDVKVMDEQDNEIEMTDVDDDDVVERKVDLQQNDAPETQKEVTD

SEQ ID NO: 14 - protein, 1183 aa, S. aureus
MAGQVVQYGRHRKRRNYARISEVLELPNLIEIQTKSYEWFLREGLIEMFRDISPIEDFTGNLSLEFVDYRLGEPKYDLEESKNRDATYAAPLRVKVRLIIKETGEVKEQEVFMGDFPLMTDTGTFVINGAERVIVSLLVRSPSVYFNEKIDKNGRENYDATIIPNRGAWLEYETDAKDVVYVRIDRTRKLPLTVLLRALGFSSDQEIVDLLGDNEYLRNTLEKDGTENTEQALLEIYERLRPGEPPTVENAKSLLYSRFFDPKRYDLASVGRYKTNKKLHLKHRLFNQKLAEPIVNTETGEIVVEEGTVLDRRKIDEIMDVLESNANSEVFELHGSVIDEPVEIQSIKVYVPNDDEGRTTTVIGNAFPDSEVKCITPADIIASMSYFFNLLSGIGYTDDIDHLGNRRLRSVGELLQNQFRIGLSRMERVVRERMSIQDTESITPQQLINIRPVIASIKEFFGSPQSSRFMRLAKPLVELTYKRHLLALGPGGLTRERAQMEVRDVHYSHYGRMCPIETPEGPNIGLFNSLSSYARVNEFGFIETPYRKVDLDTHAITDQIDYLTADEEDSYVVAQANSKLDENGRFMDDEVVCRFRGNNTVMAKEKMDYMDVSPKQVVSAATACIPFLENDDSNRALMGANMQRQAVPLMNPEAPFVGTGMEHVAARDSGAAITAKHRGRVEHVESNEILVRRLVEENGVEHEGELDRYPLAKFKRSNSGTCYNQRPIVAVGDVVEYNEILADGPSMELGEMALGRNVVVGFMTWDGYNYEDAVIMSERLVKDDVYTSIHIEEYESEARDTKLGPEEITRDIPNVSESALKNLDDRGIVYIGAEVKDGDILVGKVTPKGVTELTAEERLLHAIFGEKAREVRDTSLRVPHGAGGIVLDVKVFNREEGDDTLSPGVNQLVRVYIVQKRKIHVGDKMCGRHGNKGVISKIVPEEDMPYLPDGRPIDIMLNPLGVPSRMNIGQVLELHLGMAAKNLGIHVASPVFDGANDDDVWSTIEEAGMARDGKTVLYDGRTGEPFDNRISVGVMYMLKLAHMVDDKLHARSTGPYSLVTQQPLGGKAQFGGQRFGEMEVWALEAYGAAYTLQEILTYKSDDTVGRVKTYEAIVKGENISRPSVPESFRVLMKELQSLGLDVKVMDEQDNEIEMTDVDDDDVVERKVDLQQNDAPETQKEVTD

SEQ ID NO: 15 - protein, 1183 aa, S. aureus
MAGQVVQYGRHRKRRNYARISEVLELPNLIEIQTKSYEWFLREGLIEMFRDISPIEDFTGNLSLEFVDYRLGEPKYDLEESKNRDATYAAPLRVKVRLIIKETGEVKEQEVFMGDFPLMTDTGTFVINGAERVIVSQLVRSPSVYFNEKIDKNGRENYDATIIPNRGAWLEYETDAKDVVYVRIDRTRKLPLTVLLRALGFSSDQEIVDLLGDNEYLRNTLEKDGTENTEQALLEIYERLRPGEPPTVENAKSLLYSRFFDPKRYDLASVGRYKTNKKLHLKHRLFNQKLAEPIVNTETGEIVVEEGTVLDRRKIDEIMDVLESNANSEVFELHGSVIDEPVEIQSIKVYVPNDDEGRTTTVIGNAFPDSEVKCITPADIIASMSYFFNLLSGIGYTDDIDHLGNRRLRSVGELLQNQFRIGLSRMERVVRERMSIQDTESITPQQLINIRPVIASIKEFFGSSQLSKFMYQANPLDELTNKRRLSALGPGGLTRERAQMEVRDVHYSHYGRMCPIETPEGPNIGLINSLSSYARVNEFGFIETPYRKVDLDTHAITDQIDYLTADEEDSYVVAQANSKLDENGRFMDDEVVCRFRGNNTVMAKEKMDYMDVSPKQVVSAATACIPFLENDDSNRALMGANMQRQAVPLMNPEAPFVGTGMEHVAARDSGAAITAKHRGRVEHVESNEILVRRLVEENGVEHEGELDRYPLAKFKRSNSGTCYNQRPIVAVGDVVEYNEILADGPSMELGEMALGRNVVVGFMTWDGYNYEDAVIMSERLVKDDVYTSIHIEEYESEARDTKLGPEEITRDIPNVSESALKNLDDRGIVYIGAEVKDGDILVGKVTPKGVTELTAEERLLHAIFGEKAREVRDTSLRVPHGAGGIVLDVKVFNREEGDDTLSPGVNQLVRVYIVQKRKIHVGDKMCGRHGNKGVISKIVPEEDMPYLPDGRPIDIMLNPLGVPSRMNIGQVLELHLGMAAKNLGIHVASPVFDGANDDDVWSTIEEAGMARDGKTVLYDGRTGEPFDNRISVGVMYMLKLAHMVDDKLHARSTGPYSLVTQQPLGGKAQFGGQRFGEMEVWALEAYGAAYTLQEILTYKSDDTVGRVKTYEAIVKGENISRPSVPESFRVLMKELQSLGLDVKVMDEQDNEIEMTDVDDDDVVERKVDLQQNDAPETQKEVTD

SEQ ID NO: 16 - protein, 1183 aa, S. aureus
MAGQVVQYGRHRKRRNYARISEVLELPNLIEIQTKSYEWFLREGLIEMFRDISPIEDFTGNLSLEFVDYRLGEPKYDLEESKNRDATYAAPLRVKVRLIIKETGEVKEQEVFMGDFPLMTDTGTFVINGAERVIVSQLVRSPSVYFNEKIDKNGRENYDATIIPNRGAWLEYETDAKDVVYVRIDRTRKLPLTVLLRALGFSSDQEIVDLLGDNEYLRNTLEKDGTENTEQALLEIYERLRPGEPPTVENAKSLLYSRFFDPKRYDLASVGRYKTNKKLHLKHRLFNQKLAEPIVNTETGEIVVEEGTVLDRRKIDEIMDVLESNANSEVFELHGSVIDEPVEIQSIKVYVPNDDEGRTTTVIGNAFPDSEVKCITPADIIASMSYFFNLLSGIGYTDDIDHLGNRRLRSVGELLQNQFRIGLSRMERVVRERMSIQDTESITPQQLINIRPVIASIKEFFGSSQLSLFMEQANPLAELTNKRRLSALGPGGLTRERAQMEVRDVHYSHYGRMCPIETPEGPNIGLINSLSSYARVNEFGFIETPYRKVDLDTHAITDQIDYLTADEEDSYVVAQANSKLDENGRFMDDEVVCRFRGNNTVMAKEKMDYMDVSPKQVVSAATACIPFLENDDSNRALMGANMQRQAVPLMNPEAPFVGTGMEHVAARDSGAAITAKHRGRVEHVESNEILVRRLVEENGVEHEGELDRYPLAKFKRSNSGTCYNQRPIVAVGDVVEYNEILADGPSMELGEMALGRNVVVGFMTWDGYNYEDAVIMSERLVKDDVYTSIHIEEYESEARDTKLGPEEITRDIPNVSESALKNLDDRGIVYIGAEVKDGDILVGKVTPKGVTELTAEERLLHAIFGEKAREVRDTSLRVPHGAGGIVLDVKVFNREEGDDTLSPGVNQLVRVYIVQKRKIHVGDKMCGRHGNKGVISKIVPEEDMPYLPDGRPIDIMLNPLGVPSRMNIGQVLELHLGMAAKNLGIHVASPVFDGANDDDVWSTIEEAGMARDGKTVLYDGRTGEPFDNRISVGVMYMLKLAHMVDDKLHARSTGPYSLVTQQPLGGKAQFGGQRFGEMEVWALEAYGAAYTLQEILTYKSDDTVGRVKTYEAIVKGENISRPSVPESFRVLMKELQSLGLDVKVMDEQDNEIEMTDVDDDDVVERKVDLQQNDAPETQKEVTD

SEQ ID NO: 17 - protein, 1183 aa, S. aureus
MAGQVVQYGRHRKRRNYARISEVLELPNLIEIQTKSYEWFLREGLIEMFRDISPIEDFTGNLSLEFVDYRLGEPKYDLEESKNRDATYAAPLRVKVRLIIKETGEVKEQEVFMGDFPLMTDTGTFVINGAERVIVSQLVRSPSVYFNEKIDKNGRENYDATIIPNRGAWLEYETDAKDVVYVRIDRTRKLPLTVLLRALGFSSDQEIVDLLGDNEYLRNTLEKDGTENTEQALLEIYERLRPGEPPTVENAKSLLYSRFFDPKRYDLASVGRYKTNKKLHLKHRLFNQKLAEPIVNTETGEIVVEEGTVLDRRKIDEIMDVLESNANSEVFELHGSVIDEPVEIQSIKVYVPNDDEGRTTTVIGNAFPDSEVKCITPADIIASMSYFFNLLSGIGYTDDIDHLGNRRLRSVGELLQNQFRIGLSRMERVVRERMSIQDTESITPQQLINIRPVIASIKEFFGSSQLSQFMGQANPLAELTDKRRLSALGPGGLTRERAQMEVRDVHYSHYGRMCPIETPEGPNIGLINSLSSYARVNEFGFIETPYRKVDLDTHAITDQIDYLTADEEDSYVVAQANSKLDENGRFMDDEVVCRFRGNNTVMAKEKMDYMDVSPKQVVSAATACIPFLENDDSNRALMGANMQRQAVPLMNPEAPFVGTGMEHVAARDSGAAITAKHRGRVEHVESNEILVRRLVEENGVEHEGELDRYPLAKFKRSNSGTCYNQRPIVAVGDVVEYNEILADGPSMELGEMALGRNVVVGFMTWDGYNYEDAVIMSERLVKDDVYTSIHIEEYESEARDTKLGPEEITRDIPNVSESALKNLDDRGIVYIGAEVKDGDILVGKVTPKGVTELTAEERLLHAIFGEKAREVRDTSLRVPHGAGGIVLDVKVFNREEGDDTLSPGVNQLVRVYIVQKRKIHVGDKMCGRHGNKGVISKIVPEEDMPYLPDGRPIDIMLNPLGVPSRMNIGQVLELHLGMAAKNLGIHVASPVFDGANDDDVWSTIEEAGMARDGKTVLYDGRTGEPFDNRISVGVMYMLKLAHMVDDKLHARSTGPYSLVTQQPLGGKAQFGGQRFGEMEVWALEAYGAAYTLQEILTYKSDDTVGRVKTYEAIVKGENISRPSVPESFRVLMKELQSLGLDVKVMDEQDNEIEMTDVDDDDVVERKVDLQQNDAPETQKEVTD

SEQ ID NO: 18 - protein, 1183 aa, S. aureus
MAGQVVQYGRHRKRRNYARISEVLELPNLIEIQTKSYEWFLREGLIEMFRDISPIEDFTGNLSLEFVDYRLGEPKYDLEESKNRDATYAAPLRVKVRLIIKETGEVKEQEVFMGDFPLMTDTGTFVINGAERVIVSQLVRSPSVYFNEKIDKNGRENYDATIIPNRGAWLEYETDAKDVVYVRIDRTRKLPLTVLLRALGFSSDQEIVDLLGDNEYLRNTLEKDGTENTEQALLEIYERLRPGEPPTVENAKSLLYSRFFDPKRYDLASVGRYKTNKKLHLKHRLFNQKLAEPIVNTETGEIVVEEGTVLDRRKIDEIMDVLESNANSEVFELHGSVIDEPVEIQSIKVYVPNDDEGRTTTVIGNAFPDSEVKCITPADIIASMSYFFNLLSGIGYTDDIDHLGNRRLRSVGELLQNQFRIGLSRMERVVRERMSIQDTESITPQQLINIRPVIASIKEFFGSSQLSQFMYQANPLAELTHKRRLSALGPGGLTRERAQMEVRDVHYSHYGRMCPIETPEGPNIGLINSLSSYARVNEFGFIETPYRKVDLDTHAITDQIDYLTADEEDSYVVAQANSKLDENGRFMDDEVVCRFRGNNTVMAKEKMDYMDVSPKQVVSAATACIPFLENDDSNRALMGANMQRQAVPLMNPEAPFVGTGMEHVAARDSGAAITAKHRGRVEHVESNEILVRRLVEENGVEHEGELDRYPLAKFKRSNSGTCYNQRPIVAVGDVVEYNEILADGPSMELGEMALGRNVVVGFMTWDGYNYEDAVIMSERLVKDDVYTSIHIEEYESEARDTKLGPEEITRDIPNVSESALKNLDDRGIVYIGAEVKDGDILVGKVTPKGVTELTAEERLLHAIFGEKAREVRDTSLRVPHGAGGIVLDVKVFNREEGDDTLSPGVNQLVRVYIVQKRKIHVGDKMCGRHGNKGVISKIVPEEDMPYLPDGRPIDIMLNPLGVPSRMNIGQVLELHLGMAAKNLGIHVASPVFDGANDDDVWSTIEEAGMARDGKTVLYDGRTGEPFDNRISVGVMYMLKLAHMVDDKLHARSTGPYSLVTQQPLGGKAQFGGQRFGEMEVWALEAYGAAYTLQEILTYKSDDTVGRVKTYEAIVKGENISRPSVPESFRVLMKELQSLGLDVKVMDEQDNEIEMTDVDDDDVVERKVDLQQNDAPETQKEVTD

SEQ ID NO: 19 - protein, 1193 aa, B.subtilis
MTGQLVQYGRHRQRRSYARISEVLELPNLIEIQTSSYQWFLDEGLREMFQDISPIEDFTGNLSLEFIDYSLGEPKYPVEESKERDVTYSAPLRVKVRLINKETGEVKDQDVFMGDFPIMTDTGTFIINGAERVIVSQLVRSPSVYFSGKVDKNGKKGFTATVIPNRGAWLEYETDAKDVVYVRIDRTRKLPVTVLLRALGFGSDQEILDLIGENEYLRNTLDKDNTENSDKALLEIYERLRPGEPPTVENAKSLLDSRFFDPKRYDLANVGRYKINKKLHIKNRLFNQRLAETLVDPETGEILAEKGQILDRRTLDKVLPYLENGIGFRKLYPNGGVVEDEVTLQSIKIFAPTDQEGEQVINVIGNAYIEEEIKNITPADIISSISYFFNLLHGVGDTDDIDHLGNRRLRSVGELLQNQFRIGLSRMERVVRERMSIQDTNTITPQQLINIRPVIASIKEFFGSSQLSQFMDQTNPLAELTHKRRLSALGPGGLTRERAGMEVRDVHYSHYGRMCPIETPEGPNIGLINSLSSYAKVNRFGFIETPYRRVDPETGKVTGRIDYLTADEEDNYVVAQANARLDDEGAFIDDSIVARFRGENTVVSRNRVDYMDVSPKQVVSAATACIPFLENDDSNRALMGANMQRQAVPLMQPEAPFVGTGMEYVSGKDSGAAVICKHPGIVERVEAKNVWVRRYEEVDGQKVKGNLDKYSLLKFVRSNQGTCYNQRPIVSVGDEVVKGEILADGPSMELGELALGRNVMVGFMTWDGYNYEDAIIMSERLVKDDVYTSIHIEEYESEARDTKLGPEEITRDIPNVGEDALRNLDDRGIIRIGAEVKDGDLLVGKVTPKGVTELTAEERLLHAIFGEKAREVRDTSLRVPHGGGGIIHDVKVFNREDGDELPPGVNQLVRVYIVQKRKISEGDKMAGRHGNKGVISKILPEEDMPYLPDGTPIDIMLNPLGVPSRMNIGQVLELHMGMAARYLGIHIASPVFDGAREEDVWETLEEAGMSRDAKTVLYDGRTGEPFDNRVSVGIMYMIKLAHMVDDKLHARSTGPYSLVTQQPLGGKAQFGGHGFGEMEVWALEAYGAAYTLQEILTVKSDDVVGRVKTYEAIVKGDNVPEPGVPESFKVLIKELQSLGMDVKILSGDEEEIEMRDLEDEEDAKQADGLALSGDEEPEETASADVERDVVTKE

SEQ ID NO: 20 - protein, 1193 aa, B.subtilis
MTGQLVQYGRHRQRRSYARISEVLELPNLIEIQTSSYQWFLDEGLREMFQDISPIEDFTGNLSLEFIDYSLGEPKYPVEESKERDVTYSAPLRVKVRLINKETGEVKDQDVFMGDFPIMTDTGTFIINGAERVIVSQLVRSPSVYFSGKVDKNGKKGFTATVIPNRGAWLEYETDAKDVVYVRIDRTRKLPVTVLLRALGFGSDQEILDLIGENEYLRNTLDKDNTENSDKALLEIYERLRPGEPPTVENAKSLLDSRFFDPKRYDLANVGRYKINKKLHIKNRLFNQRLAETLVDPETGEILAEKGQILDRRTLDKVLPYLENGIGFRKLYPNGGVVEDEVTLQSIKIFAPTDQEGEQVINVIGNAYIEEEIKNITPADIISSISYFFNLLHGVGDTDDIDHLGNRRLRSVGELLQNQFRIGLSRMERVVRERMSIQDTNTITPQQLINIRPVIASIKEFFGSSQLLPKMYQTNPLAELPYQRRLSALGPGGLTRERAGMEVRDVHYSHYGRMCPIETPEGPNIGLINSLSSYAKVNRFGFIETPYRRVDPETGKVTGRIDYLTADEEDNYVVAQANARLDDEGAFIDDSIVARFRGENTVVSRNRVDYMDVSPKQVVSAATACIPFLENDDSNRALMGANMQRQAVPLMQPEAPFVGTGMEYVSGKDSGAAVICKHPGIVERVEAKNVWVRRYEEVDGQKVKGNLDKYSLLKFVRSNQGTCYNQRPIVSVGDEVVKGEILADGPSMELGELALGRNVMVGFMTWDGYNYEDAIIMSERLVKDDVYTSIHIEEYESEARDTKLGPEEITRDIPNVGEDALRNLDDRGIIRIGAEVKDGDLLVGKVTPKGVTELTAEERLLHAIFGEKAREVRDTSLRVPHGGGGIIHDVKVFNREDGDELPPGVNQLVRVYIVQKRKISEGDKMAGRHGNKGVISKILPEEDMPYLPDGTPIDIMLNPLGVPSRMNIGQVLELHMGMAARYLGIHIASPVFDGAREEDVWETLEEAGMSRDAKTVLYDGRTGEPFDNRVSVGIMYMIKLAHMVDDKLHARSTGPYSLVTQQPLGGKAQFGGHGFGEMEVWALEAYGAAYTLQEILTVKSDDVVGRVKTYEAIVKGDNVPEPGVPESFKVLIKELQSLGMDVKILSGDEEEIEMRDLEDEEDAKQADGLALSGDEEPEETASADVERDVVTKE

SEQ ID NO: 21 - protein, 1193 aa, B.subtilis
MTGQLVQYGRHRQRRSYARISEVLELPNLIEIQTSSYQWFLDEGLREMFQDISPIEDFTGNLSLEFIDYSLGEPKYPVEESKERDVTYSAPLRVKVRLINKETGEVKDQDVFMGDFPIMTDTGTFIINGAERVIVSQLVRSPSVYFSGKVDKNGKKGFTATVIPNRGAWLEYETDAKDVVYVRIDRTRKLPVTVLLRALGFGSDQEILDLIGENEYLRNTLDKDNTENSDKALLEIYERLRPGEPPTVENAKSLLDSRFFDPKRYDLANVGRYKINKKLHIKNRLFNQRLAETLVDPETGEILAEKGQILDRRTLDKVLPYLENGIGFRKLYPNGGVVEDEVTLQSIKIFAPTDQEGEQVINVIGNAYIEEEIKNITPADIISSISYFFNLLHGVGDTDDIDHLGNRRLRSVGELLQNQFRIGLSRMERVVRERMSIQDTNTITPQQLINIRPVIASIKEFFGSSQLSRFMDQTNPLAELTRKRRLSALGPGGLTRERAGMEVRDVHYSHYGRMCPIETPEGPNIGLINSLSSYAKVNRFGFIETPYRRVDPETGKVTGRIDYLTADEEDNYVVAQANARLDDEGAFIDDSIVARFRGENTVVSRNRVDYMDVSPKQVVSAATACIPFLENDDSNRALMGANMQRQAVPLMQPEAPFVGTGMEYVSGKDSGAAVICKHPGIVERVEAKNVWVRRYEEVDGQKVKGNLDKYSLLKFVRSNQGTCYNQRPIVSVGDEVVKGEILADGPSMELGELALGRNVMVGFMTWDGYNYEDAIIMSERLVKDDVYTSIHIEEYESEARDTKLGPEEITRDIPNVGEDALRNLDDRGIIRIGAEVKDGDLLVGKVTPKGVTELTAEERLLHAIFGEKAREVRDTSLRVPHGGGGIIHDVKVFNREDGDELPPGVNQLVRVYIVQKRKISEGDKMAGRHGNKGVISKILPEEDMPYLPDGTPIDIMLNPLGVPSRMNIGQVLELHMGMAARYLGIHIASPVFDGAREEDVWETLEEAGMSRDAKTVLYDGRTGEPFDNRVSVGIMYMIKLAHMVDDKLHARSTGPYSLVTQQPLGGKAQFGGHGFGEMEVWALEAYGAAYTLQEILTVKSDDVVGRVKTYEAIVKGDNVPEPGVPESFKVLIKELQSLGMDVKILSGDEEEIEMRDLEDEEDAKQADGLALSGDEEPEETASADVERDVVTKE

SEQ ID NO: 22 - protein, 1177 aa, B. anthracis
MTGQLVQYGRHRQRRSYARISEVLELPNLIEIQTSSYQWFLDEGLREMFQDISPIEDFTGNLSLEFIDYSLGEPKYSVDECKERDVTYAAPLRVKVRLINKETGEVKEQDVFMGDFPLMTETGTFVINGAERVIVSQLVRSPSVYYSGKVDKNGKRGFTATVIPNRGAWLEYETDAKDVVYVRIDRTRKLPVTVLLRALGFGSDQEITELLGDNEYLSNTLEKDNTDSTEKALLEIYERLRPGEPPTVENAKSLLVSRFFDPKRYDLANVGRYKINKKLHIKNRLFNQRLAETLVDPETGEILAAEGTILDRRTLDRILPYLEKNIGFKTAKPMGGVVEGDVELQSIKIYAPESEGERVINVIGNANITRDVKHITPGDILASISYFFNLLYKVGDTDDIDHLGNRRLRSVGELLQNQFRIGLSRMERVVRERMSIQDTNAITPQALINIRPVIAAIKEFFGSSQLSQFMDQTNPLAELTHKRRLSALGPGGLTRERAGFEVRDVHYSHYGRMCPIETPEGPNIGLINSLSSFAKVNEFGFIETPYRRVDPETGLVTGHVDYLTADEEDNYVVAQANMKLSEEGEFLDEDIVARFRGENIVTNKERIDYMDVSPKQVVSAATACIPFLENDDSNRALMGANMQRQAVPLMNPESPIVGTGMEYVSAKDSGAAVICKHPGIVERVEAREVWVRRYVEVDGQTVKGDLDRYKMQKFIRSNQGTCYNQRPIVSVGNEVVKGEILADGPSMELGELALGRNVLVGFMTWDGYNYEDAIIMSERLVKDDVYTSIHIEEYESEARDTKLGPEEITRDIPNVGEDALRNLDERGIIRVGAEVKDGDLLVGKVTPKGVTELTAEERLLHAIFGEKAREVRDTSLRVPHGGGGIILDVKVFNREDGDELPPGVNQLVRAYIVQKRKISEGDKMAGRHGNKGVISRILPEEDMPYLPDGTPIDIMLNPLGVPSRMNIGQVLELHLGMAARYLGIHIATPVFDGAREEDVWGTIEEAGMANDAKTILYDGRTGEPFDNRVSVGVMYMIKLAHMVDDKLHARSTGPYSLVTQQPLGGKAQFGGQRFGEMEVWALEAYGAAYTLQEILTVKSDDVIGRVKTYEAIVKGENVPEPGVPESFKVLIKELQSLGMDVKMMSSDDTEIEMRDTEDDDDHQSADKLNVEVETTKE

SEQ ID NO: 23 - protein, 1177 aa, B. anthracis
MTGQLVQYGRHRQRRSYARISEVLELPNLIEIQTSSYQWFLDEGLREMFQDISPIEDFTGNLSLEFIDYSLGEPKYSVDECKERDVTYAAPLRVKVRLINKETGEVKEQDVFMGDFPLMTETGTFVINGAERVIVSQLVRSPSVYYSGKVDKNGKRGFTATVIPNRGAWLEYETDAKDVVYVRIDRTRKLPVTVLLRALGFGSDQEITELLGDNEYLSNTLEKDNTDSTEKALLEIYERLRPGEPPTVENAKSLLVSRFFDPKRYDLANVGRYKINKKLHIKNRLFNQRLAETLVDPETGEILAAEGTILDRRTLDRILPYLEKNIGFKTAKPMGGVVEGDVELQSIKIYAPESEGERVINVIGNANITRDVKHITPGDILASISYFFNLLYKVGDTDDIDHLGNRRLRSVGELLQNQFRIGLSRMERVVRERMSIQDTNAITPQALINIRPVIAAIKEFFGSCQLCRFMAQSNPLAELTLQRRLFALGPGGLTRERAGFEVRDVHYSHYGRMCPIETPEGPNIGLINSLSSFAKVNEFGFIETPYRRVDPETGLVTGHVDYLTADEEDNYVVAQANMKLSEEGEFLDEDIVARFRGENIVTNKERIDYMDVSPKQVVSAATACIPFLENDDSNRALMGANMQRQAVPLMNPESPIVGTGMEYVSAKDSGAAVICKHPGIVERVEAREVWVRRYVEVDGQTVKGDLDRYKMQKFIRSNQGTCYNQRPIVSVGNEVVKGEILADGPSMELGELALGRNVLVGFMTWDGYNYEDAIIMSERLVKDDVYTSIHIEEYESEARDTKLGPEEITRDIPNVGEDALRNLDERGIIRVGAEVKDGDLLVGKVTPKGVTELTAEERLLHAIFGEKAREVRDTSLRVPHGGGGIILDVKVFNREDGDELPPGVNQLVRAYIVQKRKISEGDKMAGRHGNKGVISRILPEEDMPYLPDGTPIDIMLNPLGVPSRMNIGQVLELHLGMAARYLGIHIATPVFDGAREEDVWGTIEEAGMANDAKTILYDGRTGEPFDNRVSVGVMYMIKLAHMVDDKLHARSTGPYSLVTQQPLGGKAQFGGQRFGEMEVWALEAYGAAYTLQEILTVKSDDVIGRVKTYEAIVKGENVPEPGVPESFKVLIKELQSLGMDVKMMSSDDTEIEMRDTEDDDDHQSADKLNVEVETTKE

SEQ ID NO: 24 - protein, 1177 aa, B. anthracis
MTGQLVQYGRHRQRRSYARISEVLELPNLIEIQTSSYQWFLDEGLREMFQDISPIEDFTGNLSLEFIDYSLGEPKYSVDECKERDVTYAAPLRVKVRLINKETGEVKEQDVFMGDFPLMTETGTFVINGAERVIVSQLVRSPSVYYSGKVDKNGKRGFTATVIPNRGAWLEYETDAKDVVYVRIDRTRKLPVTVLLRALGFGSDQEITELLGDNEYLSNTLEKDNTDSTEKALLEIYERLRPGEPPTVENAKSLLVSRFFDPKRYDLANVGRYKINKKLHIKNRLFNQRLAETLVDPETGEILAAEGTILDRRTLDRILPYLEKNIGFKTAKPMGGVVEGDVELQSIKIYAPESEGERVINVIGNANITRDVKHITPGDILASISYFFNLLYKVGDTDDIDHLGNRRLRSVGELLQNQFRIGLSRMERVVRERMSIQDTNAITPQALINIRPVIAAIKEFFGSFQLSKFMDQTNPLAELTPKRRLSALGPGGLTRERAGFEVRDVHYSHYGRMCPIETPEGPNIGLINSLSSFAKVNEFGFIETPYRRVDPETGLVTGHVDYLTADEEDNYVVAQANMKLSEEGEFLDEDIVARFRGENIVTNKERIDYMDVSPKQVVSAATACIPFLENDDSNRALMGANMQRQAVPLMNPESPIVGTGMEYVSAKDSGAAVICKHPGIVERVEAREVWVRRYVEVDGQTVKGDLDRYKMQKFIRSNQGTCYNQRPIVSVGNEVVKGEILADGPSMELGELALGRNVLVGFMTWDGYNYEDAIIMSERLVKDDVYTSIHIEEYESEARDTKLGPEEITRDIPNVGEDALRNLDERGIIRVGAEVKDGDLLVGKVTPKGVTELTAEERLLHAIFGEKAREVRDTSLRVPHGGGGIILDVKVFNREDGDELPPGVNQLVRAYIVQKRKISEGDKMAGRHGNKGVISRILPEEDMPYLPDGTPIDIMLNPLGVPSRMNIGQVLELHLGMAARYLGIHIATPVFDGAREEDVWGTIEEAGMANDAKTILYDGRTGEPFDNRVSVGVMYMIKLAHMVDDKLHARSTGPYSLVTQQPLGGKAQFGGQRFGEMEVWALEAYGAAYTLQEILTVKSDDVIGRVKTYEAIVKGENVPEPGVPESFKVLIKELQSLGMDVKMMSSDDTEIEMRDTEDDDDHQSADKLNVEVETTKE

SEQ ID NO: 25 - protein, 1177 aa, B. anthracis
MTGQLVQYGRHRQRRSYARISEVLELPNLIEIQTSSYQWFLDEGLREMFQDISPIEDFTGNLSLEFIDYSLGEPKYSVDECKERDVTYAAPLRVKVRLINKETGEVKEQDVFMGDFPLMTETGTFVINGAERVIVSQLVRSPSVYYSGKVDKNGKRGFTATVIPNRGAWLEYETDAKDVVYVRIDRTRKLPVTVLLRALGFGSDQEITELLGDNEYLSNTLEKDNTDSTEKALLEIYERLRPGEPPTVENAKSLLVSRFFDPKRYDLANVGRYKINKKLHIKNRLFNQRLAETLVDPETGEILAAEGTILDRRTLDRILPYLEKNIGFKTAKPMGGVVEGDVELQSIKIYAPESEGERVINVIGNANITRDVKHITPGDILASISYFFNLLYKVGDTDDIDHLGNRRLRSVGELLQNQFRIGLSRMERVVRERMSIQDTNAITPQALINIRPVIAAIKEFFGSSQLSQFMDQTNPLAELTRKRRLSALGPGGLTRERAGFEVRDVHYSHYGRMCPIETPEGPNIGLINSLSSFAKVNEFGFIETPYRRVDPETGLVTGHVDYLTADEEDNYVVAQANMKLSEEGEFLDEDIVARFRGENIVTNKERIDYMDVSPKQVVSAATACIPFLENDDSNRALMGANMQRQAVPLMNPESPIVGTGMEYVSAKDSGAAVICKHPGIVERVEAREVWVRRYVEVDGQTVKGDLDRYKMQKFIRSNQGTCYNQRPIVSVGNEVVKGEILADGPSMELGELALGRNVLVGFMTWDGYNYEDAIIMSERLVKDDVYTSIHIEEYESEARDTKLGPEEITRDIPNVGEDALRNLDERGIIRVGAEVKDGDLLVGKVTPKGVTELTAEERLLHAIFGEKAREVRDTSLRVPHGGGGIILDVKVFNREDGDELPPGVNQLVRAYIVQKRKISEGDKMAGRHGNKGVISRILPEEDMPYLPDGTPIDIMLNPLGVPSRMNIGQVLELHLGMAARYLGIHIATPVFDGAREEDVWGTIEEAGMANDAKTILYDGRTGEPFDNRVSVGVMYMIKLAHMVDDKLHARSTGPYSLVTQQPLGGKAQFGGQRFGEMEVWALEAYGAAYTLQEILTVKSDDVIGRVKTYEAIVKGENVPEPGVPESFKVLIKELQSLGMDVKMMSSDDTEIEMRDTEDDDDHQSADKLNVEVETTKE

SEQ ID NO: 26 - protein, 1177 aa, B. anthracis
MTGQLVQYGRHRQRRSYARISEVLELPNLIEIQTSSYQWFLDEGLREMFQDISPIEDFTGNLSLEFIDYSLGEPKYSVDECKERDVTYAAPLRVKVRLINKETGEVKEQDVFMGDFPLMTETGTFVINGAERVIVSQLVRSPSVYYSGKVDKNGKRGFTATVIPNRGAWLEYETDAKDVVYVRIDRTRKLPVTVLLRALGFGSDQEITELLGDNEYLSNTLEKDNTDSTEKALLEIYERLRPGEPPTVENAKSLLVSRFFDPKRYDLANVGRYKINKKLHIKNRLFNQRLAETLVDPETGEILAAEGTILDRRTLDRILPYLEKNIGFKTAKPMGGVVEGDVELQSIKIYAPESEGERVINVIGNANITRDVKHITPGDILASISYFFNLLYKVGDTDDIDHLGNRRLRSVGELLQNQFRIGLSRMERVVRERMSIQDTNAITPQALINIRPVIAAIKEFFGSSQLSQFMDQTNPLAELTYKRRLSALGPGGLTRERAGFEVRDVHYSHYGRMCPIETPEGPNIGLINSLSSFAKVNEFGFIETPYRRVDPETGLVTGHVDYLTADEEDNYVVAQANMKLSEEGEFLDEDIVARFRGENIVTNKERIDYMDVSPKQVVSAATACIPFLENDDSNRALMGANMQRQAVPLMNPESPIVGTGMEYVSAKDSGAAVICKHPGIVERVEAREVWVRRYVEVDGQTVKGDLDRYKMQKFIRSNQGTCYNQRPIVSVGNEVVKGEILADGPSMELGELALGRNVLVGFMTWDGYNYEDAIIMSERLVKDDVYTSIHIEEYESEARDTKLGPEEITRDIPNVGEDALRNLDERGIIRVGAEVKDGDLLVGKVTPKGVTELTAEERLLHAIFGEKAREVRDTSLRVPHGGGGIILDVKVFNREDGDELPPGVNQLVRAYIVQKRKISEGDKMAGRHGNKGVISRILPEEDMPYLPDGTPIDIMLNPLGVPSRMNIGQVLELHLGMAARYLGIHIATPVFDGAREEDVWGTIEEAGMANDAKTILYDGRTGEPFDNRVSVGVMYMIKLAHMVDDKLHARSTGPYSLVTQQPLGGKAQFGGQRFGEMEVWALEAYGAAYTLQEILTVKSDDVIGRVKTYEAIVKGENVPEPGVPESFKVLIKELQSLGMDVKMMSSDDTEIEMRDTEDDDDHQSADKLNVEVETTKE

SEQ ID NO: 27 - protein, 1177 aa, B. cereus
MTGQLVQYGRHRQRRSYARISEVLELPNLIEIQTSSYQWFLDEGLREMFQDISPIEDFTGNLSLEFIDYSLGEPKYSVDECKERDVTYAAPLRVKVRLINKETGEVKEQDVFMGDFPLMTETGTFVINGAERVIVSQLVRSPSVYYSGKVDKNGKRGFTATVIPNRGAWLEYETDAKDVVYVRIDRTRKLPVTVLLRALGFGSDQEITELLGDNEYLSNTLEKDNTDSTEKALLEIYERLRPGEPPTVENAKSLLVSRFFDPKRYDLANVGRYKINKKLHIKNRLFNQRLAETLVDPETGEILAAEGTILDRRTLDRILPYLEKNIGFKTAKPMGGVVEGDVELQSIKIYAPESEGERVINVIGNANITRDVKHITPGDILASISYFFNLLYKVGDTDDIDHLGNRRLRSVGELLQNQFRIGLSRMERVVRERMSIQDTNAITPQALINIRPVIASIKEFFGSSQLSQFMDQTNPLAELTHKRRLSALGPGGLTRERAGFEVRDVHYSHYGRMCPIETPEGPNIGLINSLSSFAKVNEFGFIETPYRRVDPETGLVTGHVDYLTADEEDNYVVAQANMKLSEEGEFLDEDIVARFRGENIVTNKERIDYMDVSPKQVVSAATACIPFLENDDSNRALMGANMQRQAVPLMNPESPIVGTGMEYVSAKDSGAAVICKHPGIVERVEAREVWVRRYVEVDGQTVKGDLDRYKMQKFIRSNQGTCYNQRPIVSVGNEVVKGEILADGPSMELGELALGRNVLVGFMTWDGYNYEDAIIMSERLVKDDVYTSIHIEEYESEARDTKLGPEEITRDIPNVGEDALRNLDERGIIRVGAEVKDGDLLVGKVTPKGVTELTAEERLLHAIFGEKAREVRDTSLRVPHGGGGIILDVKVFNREDGDELPPGVNQLVRAYIVQKRKISEGDKMAGRHGNKGVISRILPEEDMPYLPDGTPIDIMLNPLGVPSRMNIGQVLELHLGMAARYLGIHIATPVFDGAREEDVWGTIEEAGMANDAKTILYDGRTGEPFDNRVSVGVMYMIKLAHMVDDKLHARSTGPYSLVTQQPLGGKAQFGGQRFGEMEVWALEAYGAAYTLQEILTVKSDDVVGRVKTYEAIVKGENVPEPGVPESFKVLIKELQSLGMDVKMMSSDDTEIEMRDTEDDDDHQSADKLNVEVETTKE

SEQ ID NO: 28 - protein, 1177 aa, B. cereus
MTGQLVQYGRHRQRRSYARISEVLELPNLIEIQTSSYQWFLDEGLREMFQDISPIEDFTGNLSLEFIDYSLGEPKYSVDECKERDVTYAAPLRVKVRLINKETGEVKEQDVFMGDFPLMTETGTFVINGAERVIVSQLVRSPSVYYSGKVDKNGKRGFTATVIPNRGAWLEYETDAKDVVYVRIDRTRKLPVTVLLRALGFGSDQEITELLGDNEYLSNTLEKDNTDSTEKALLEIYERLRPGEPPTVENAKSLLVSRFFDPKRYDLANVGRYKINKKLHIKNRLFNQRLAETLVDPETGEILAAEGTILDRRTLDRILPYLEKNIGFKTAKPMGGVVEGDVELQSIKIYAPESEGERVINVIGNANITRDVKHITPGDILASISYFFNLLYKVGDTDDIDHLGNRRLRSVGELLQNQFRIGLSRMERVVRERMSIQDTNAITPQALINIRPVIASIKEFFGSSQLSQFMDQTNPLAELTPKRRLSALGPGGLTRERAGFEVRDVHYSHYGRMCPIETPEGPNIGLINSLSSFAKVNEFGFIETPYRRVDPETGLVTGHVDYLTADEEDNYVVAQANMKLSEEGEFLDEDIVARFRGENIVTNKERIDYMDVSPKQVVSAATACIPFLENDDSNRALMGANMQRQAVPLMNPESPIVGTGMEYVSAKDSGAAVICKHPGIVERVEAREVWVRRYVEVDGQTVKGDLDRYKMQKFIRSNQGTCYNQRPIVSVGNEVVKGEILADGPSMELGELALGRNVLVGFMTWDGYNYEDAIIMSERLVKDDVYTSIHIEEYESEARDTKLGPEEITRDIPNVGEDALRNLDERGIIRVGAEVKDGDLLVGKVTPKGVTELTAEERLLHAIFGEKAREVRDTSLRVPHGGGGIILDVKVFNREDGDELPPGVNQLVRAYIVQKRKISEGDKMAGRHGNKGVISRILPEEDMPYLPDGTPIDIMLNPLGVPSRMNIGQVLELHLGMAARYLGIHIATPVFDGAREEDVWGTIEEAGMANDAKTILYDGRTGEPFDNRVSVGVMYMIKLAHMVDDKLHARSTGPYSLVTQQPLGGKAQFGGQRFGEMEVWALEAYGAAYTLQEILTVKSDDVVGRVKTYEAIVKGENVPEPGVPESFKVLIKELQSLGMDVKMMSSDDTEIEMRDTEDDDDHQSADKLNVEVETTKE

SEQ ID NO: 29 - protein, 1177 aa, B. cereus
MTGQLVQYGRHRQRRSYARISEVLELPNLIEIQTSSYQWFLDEGLREMFQDISPIEDFTGNLSLEFIDYSLGEPKYSVDECKERDVTYAAPLRVKVRLINKETGEVKEQDVFMGDFPLMTETGTFVINGAERVIVSQLVRSPSVYYSGKVDKNGKRGFTATVIPNRGAWLEYETDAKDVVYVRIDRTRKLPVTVLLRALGFGSDQEITELLGDNEYLSNTLEKDNTDSTEKALLEIYERLRPGEPPTVENAKSLLVSRFFDPKRYDLANVGRYKINKKLHIKNRLFNQRLAETLVDPETGEILAAEGTILDRRTLDRILPYLEKNIGFKTAKPMGGVVEGDVELQSIKIYAPESEGERVINVIGNANITRDVKHITPGDILASISYFFNLLYKVGDTDDIDHLGNRRLRSVGELLQNQFRIGLSRMERVVRERMSIQDTNAITPQALINIRPVIASIKEFFGSSQLSRFMDQTNPLAELTRKRRLFALGPGGLTRERAGFEVRDVHYSHYGRMCPIETPEGPNIGLINSLSSFAKVNEFGFIETPYRRVDPETGLVTGHVDYLTADEEDNYVVAQANMKLSEEGEFLDEDIVARFRGENIVTNKERIDYMDVSPKQVVSAATACIPFLENDDSNRALMGANMQRQAVPLMNPESPIVGTGMEYVSAKDSGAAVICKHPGIVERVEAREVWVRRYVEVDGQTVKGDLDRYKMQKFIRSNQGTCYNQRPIVSVGNEVVKGEILADGPSMELGELALGRNVLVGFMTWDGYNYEDAIIMSERLVKDDVYTSIHIEEYESEARDTKLGPEEITRDIPNVGEDALRNLDERGIIRVGAEVKDGDLLVGKVTPKGVTELTAEERLLHAIFGEKAREVRDTSLRVPHGGGGIILDVKVFNREDGDELPPGVNQLVRAYIVQKRKISEGDKMAGRHGNKGVISRILPEEDMPYLPDGTPIDIMLNPLGVPSRMNIGQVLELHLGMAARYLGIHIATPVFDGAREEDVWGTIEEAGMANDAKTILYDGRTGEPFDNRVSVGVMYMIKLAHMVDDKLHARSTGPYSLVTQQPLGGKAQFGGQRFGEMEVWALEAYGAAYTLQEILTVKSDDVVGRVKTYEAIVKGENVPEPGVPESFKVLIKELQSLGMDVKMMSSDDTEIEMRDTEDDDDHQSADKLNVEVETTKE

SEQ ID NO: 30 - protein, 1177 aa, B. cereus
MTGQLVQYGRHRQRRSYARISEVLELPNLIEIQTSSYQWFLDEGLREMFQDISPIEDFTGNLSLEFIDYSLGEPKYSVDECKERDVTYAAPLRVKVRLINKETGEVKEQDVFMGDFPLMTETGTFVINGAERVIVSQLVRSPSVYYSGKVDKNGKRGFTATVIPNRGAWLEYETDAKDVVYVRIDRTRKLPVTVLLRALGFGSDQEITELLGDNEYLSNTLEKDNTDSTEKALLEIYERLRPGEPPTVENAKSLLVSRFFDPKRYDLANVGRYKINKKLHIKNRLFNQRLAETLVDPETGEILAAEGTILDRRTLDRILPYLEKNIGFKTAKPMGGVVEGDVELQSIKIYAPESEGERVINVIGNANITRDVKHITPGDILASISYFFNLLYKVGDTDDIDHLGNRRLRSVGELLQNQFRIGLSRMERVVRERMSIQDTNAITPQALINIRPVIASIKEFFGSSQLSQFMDQTNPLAELTLKRRLSALGPGGLTRERAGFEVRDVHYSHYGRMCPIETPEGPNIGLINSLSSFAKVNEFGFIETPYRRVDPETGLVTGHVDYLTADEEDNYVVAQANMKLSEEGEFLDEDIVARFRGENIVTNKERIDYMDVSPKQVVSAATACIPFLENDDSNRALMGANMQRQAVPLMNPESPIVGTGMEYVSAKDSGAAVICKHPGIVERVEAREVWVRRYVEVDGQTVKGDLDRYKMQKFIRSNQGTCYNQRPIVSVGNEVVKGEILADGPSMELGELALGRNVLVGFMTWDGYNYEDAIIMSERLVKDDVYTSIHIEEYESEARDTKLGPEEITRDIPNVGEDALRNLDERGIIRVGAEVKDGDLLVGKVTPKGVTELTAEERLLHAIFGEKAREVRDTSLRVPHGGGGIILDVKVFNREDGDELPPGVNQLVRAYIVQKRKISEGDKMAGRHGNKGVISRILPEEDMPYLPDGTPIDIMLNPLGVPSRMNIGQVLELHLGMAARYLGIHIATPVFDGAREEDVWGTIEEAGMANDAKTILYDGRTGEPFDNRVSVGVMYMIKLAHMVDDKLHARSTGPYSLVTQQPLGGKAQFGGQRFGEMEVWALEAYGAAYTLQEILTVKSDDVVGRVKTYEAIVKGENVPEPGVPESFKVLIKELQSLGMDVKMMSSDDTEIEMRDTEDDDDHQSADKLNVEVETTKE

SEQ ID NO: 31 - protein, 2890 aa, H. pylori
MSKKIPLKNRLRADFTKTPTDLEVPNLLLLQRDSYDSFLYSKEGKESGIEKVFKSIFPIQDEHNRITLEYAGCEFGKSKYTVREAMERGITYSIPLKIKVRLILWEKDTKSGEKNGIKDIKEQSIFIREIPLMTERTSFIINGVERVVVNQLHRSPGVIFKEEESSTSLNKLIYTGQIIPDRGSWLYFEYDSKDVLYARINKRRKVPVTILFRAMDYQKQDIIKMFYPLVKVRYENDKYLIPFASLDANQRMEFDLKDPQGKVILLAGKKLTSRKIKELKENHLEWVEYPMDILLNRHLAEPVMVGKEVLLDMLTQLDKNKLEKIHDLGVQEFVIINDLALGHDASIIQSFSADSESLKLLKQTEKIDDENALAAIRIHKVMKPGDPVTTEVAKQFVKKLFFDPERYDLTMVGRMKMNHKLGLHVPDYITTLTHEDIITTVKYLMKIKNNQGKIDDRDHLGNRRIRAVGELLANELHSGLVKMQKTIKDKLTTMSGAFDSLMPHDLVNSKMITSTIMEFFMGGQLSQFMDQTNPLSEVTHKRRLSALGEGGLVKDRVGFEARDVHPTHYGRICPIETPEGQNIGLINTLSTFTRVNDLGFIEAPYKKVVDGKVVGETIYLTAIQEDSHIIAPASTPIDEEGNILGDLIETRVEGEIVLNEKSKVTLMDLSSSMLVGVAASLIPFLEHDDANRALMGTNMQRQAVPLLRSDAPIVGTGIEKIIARDSWGAIKANRAGVVEKIDSKNIYILGESKEEAYIDAYSLQKNLRTNQNTSFNQVPIVKVGDKVGAGQIIADGPSMDRGELALGKNVRVAFMPWNGYNFEDAIVVSECITKDDIFTSTHIYEKEVDARELKHGVEEFTADIPDVKEEALAHLDESGIVKVGTYVSAGMILVGKTSPKGEIKSTPEERLLRAIFGDKAGHVVNKSLYCPPSLEGTVIDVKVFTKKGYEKDARVLSAYEEEKAKLDMEHFDRLTMLNREELLRVSSLLSQAILEEPFSHNGKDYKEGDQIPKEEIASINRFTLASLVKKYSKEVQNHYEITKNNFLEQKKVLGEEHEEKLSILEKDDILPNGVIKKVKLYIATKRKLKVGDKMAGRHGNKGIVSNIVPVADMPYTADGEPVDIVLNPLGVPSRMNIGQILEMHLGLVGKEFGKQIARMLEDKTKDFAKELRAKMLEIANAINEKDPLTIHALENCSDEELLEYAKDWSKGVKMAIPVFEGISQEKFYKLFELAKIAMDGKMDLYDGRTGEKMRERVNVGYMYMIKLHHLVDEKVHARSTGPYSLVTHQPVGGKALFGGQRFGEMEVWALEAYGAAHTLKEMLTIKSDDIRGRENAYRAIAKGEQVGESEIPETFYVLTKELQSLALDINIFGDDVDEDGAPKPIVIKEDDRPKDFSSFQLTLASPEKIHSWSYGEVKKPETINYRTLKPERDGLFCMKIFGPTKDYECLCGKYKKPRFKDIGTCEKCGVAITHSKVRRFRMGHIELATPVAHIWYVNSLPSRIGTLLGVKMKDLERVLYYEAYIVKEPGEAAYDNEGTKLVMKYDILNEEQYQNISRRYEDRGFVAQMGGEAIKDLLEEIDLITLLQSLKEEVKDTNSDAKKKKLIKRLKVVESFLNSGNRPEWMMLTVLPVLPPDLRPLVALDGGKFAVSDVNELYRRVINRNQRLKRLMELGAPEIIVRNEKRMLQEAVDVLFDNGRSTNAVKGANKRPLKSLSEIIKGKQGRFRQNLLGKRVDFSGRSVIVVGPNLKMDECGLPKNMALELFKPHLLSKLEERGYATTLKQAKRMIEQKSNEVWECLQEITEGYPVLLNRAPTLHKQSIQAFHPKLIDGKAIQLHPLVCSAFNADFDGDQMAVHVPLSQEAIAECKVLMLSSMNILLPASGKAVAIPSQDMVLGLYYLSLEKSGVKGEHKLFSSVNEIITAIDTKELDIHAKIRVLDQGNIIATSAGRMIIKSILPDFIPTDLWNRPMKKKDIGVLVDYVHKVGGIGITATFLDNLKTLGFRYATKAGISISMEDIITPKDKQKMVEKAKVEVKKIQQQYDQGLLTDQERYNKIIDTWTEVNDKMSKEMMTAIAQDKEGFNSIYMMADSGARGSAAQIRQLSAMRGLMTKPDGSIIETPIISNFKEGLNVLEYFNSTHGARKGLADTALKTANAGYLTRKLIDVSQNVKVVSDDCGTHEGIEITDIAVGSELIEPLEERIFGRVLLEDVIDPITNEILLYADTLIDEEGAKKVVEAGIKSITIRTPVTCKAPKGVCAKCYGLNLGEGKMSYPGEAVGVVAAQSIGEPGTQLTLRTFHVGGTASRSQDEREIVASKEGFVRFYNLRTYTNKEGKNIIANRRNASILVVEPKIKAPFDGELRIETVYEEVVVSVKNGDQEAKFVLRRSDIVKPSELAGVGGKIEGKVYLPYASGHKVHKGGSIADIIQEGWNVPNRIPYASELLVKDNDPIAQDVYAKEKGVIKYYVLEANHLERTHGIKKGDMVSEKGLFAVIADDNGREAARHYIARGSEILIDDNSEVSTNSVISKPTTNTFKTIATWDPYNTPIIADFKGKVGFVDVIAGVTVAEKEDENTGITSLVVNDYIPSGYKPSLFLEGANGEEMRYFLEPKTSIAISDGSSVEQAEVLAKIPKATVKSRDITGGLPRVSELFEARKPKPKDVAILSEVDGIVSFGKPIRNKEHIIVTSKDGRSMDYFVDKGKQILVHADEFVHAGEAMTDGVISSHDILRISGEKELYKYIVSEVQQVYRRQGVSIADKHIEIIVSQMLRQVRILDSGDSKFIEGDLVSKKLFKEENARVIALKGEPAIAEPVLLGITRAAIGSDSIISAASFQETTKVLTEASIAMKKDFLEDLKENVVLGRMIPVGTGMYKNKKIVLRALEDNSKF

SEQ ID NO: 32 - protein, 2890 aa, H. pylori
MSKKIPLKNRLRADFTKTPTDLEVPNLLLLQRDSYDSFLYSKEGKESGIEKVFKSIFPIQDEHNRITLEYAGCEFGKSKYTVREAMERGITYSIPLKIKVRLILWEKDTKSGEKNGIKDIKEQSIFIREIPLMTERTSFIINGVERVVVNQLHRSPGVIFKEEESSTSLNKLIYTGQIIPDRGSWLYFEYDSKDVLYARINKRRKVPVTILFRAMDYQKQDIIKMFYPLVKVRYENDKYLIPFASLDANQRMEFDLKDPQGKVILLAGKKLTSRKIKELKENHLEWVEYPMDILLNRHLAEPVMVGKEVLLDMLTQLDKNKLEKIHDLGVQEFVIINDLALGHDASIIQSFSADSESLKLLKQTEKIDDENALAAIRIHKVMKPGDPVTTEVAKQFVKKLFFDPERYDLTMVGRMKMNHKLGLHVPDYITTLTHEDIITTVKYLMKIKNNQGKIDDRDHLGNRRIRAVGELLANELHSGLVKMQKTIKDKLTTMSGAFDSLMPHDLVNSKMITSTIMEFFMGGQPSKFMVQTNPLSEVTYKRRLLALGEGGLVKDRVGFEARDVHPTHYGRICPIETPEGQNIGLNNTLSTFTRVNDLGFIEAPYKKVVDGKVVGETIYLTAIQEDSHIIAPASTPIDEEGNILGDLIETRVEGEIVLNEKSKVTLMDLSSSMLVGVAASLIPFLEHDDANRALMGTNMQRQAVPLLRSDAPIVGTGIEKIIARDSWGAIKANRAGVVEKIDSKNIYILGESKEEAYIDAYSLQKNLRTNQNTSFNQVPIVKVGDKVGAGQIIADGPSMDRGELALGKNVRVAFMPWNGYNFEDAIVVSECITKDDIFTSTHIYEKEVDARELKHGVEEFTADIPDVKEEALAHLDESGIVKVGTYVSAGMILVGKTSPKGEIKSTPEERLLRAIFGDKAGHVVNKSLYCPPSLEGTVIDVKVFTKKGYEKDARVLSAYEEEKAKLDMEHFDRLTMLNREELLRVSSLLSQAILEEPFSHNGKDYKEGDQIPKEEIASINRFTLASLVKKYSKEVQNHYEITKNNFLEQKKVLGEEHEEKLSILEKDDILPNGVIKKVKLYIATKRKLKVGDKMAGRHGNKGIVSNIVPVADMPYTADGEPVDIVLNPLGVPSRMNIGQILEMHLGLVGKEFGKQIARMLEDKTKDFAKELRAKMLEIANAINEKDPLTIHALENCSDEELLEYAKDWSKGVKMAIPVFEGISQEKFYKLFELAKIAMDGKMDLYDGRTGEKMRERVNVGYMYMIKLHHLVDEKVHARSTGPYSLVTHQPVGGKALFGGQRFGEMEVWALEAYGAAHTLKEMLTIKSDDIRGRENAYRAIAKGEQVGESEIPETFYVLTKELQSLALDINIFGDDVDEDGAPKPIVIKEDDRPKDFSSFQLTLASPEKIHSWSYGEVKKPETINYRTLKPERDGLFCMKIFGPTKDYECLCGKYKKPRFKDIGTCEKCGVAITHSKVRRFRMGHIELATPVAHIWYVNSLPSRIGTLLGVKMKDLERVLYYEAYIVKEPGEAAYDNEGTKLVMKYDILNEEQYQNISRRYEDRGFVAQMGGEAIKDLLEEIDLITLLQSLKEEVKDTNSDAKKKKLIKRLKVVESFLNSGNRPEWMMLTVLPVLPPDLRPLVALDGGKFAVSDVNELYRRVINRNQRLKRLMELGAPEIIVRNEKRMLQEAVDVLFDNGRSTNAVKGANKRPLKSLSEIIKGKQGRFRQNLLGKRVDFSGRSVIVVGPNLKMDECGLPKNMALELFKPHLLSKLEERGYATTLKQAKRMIEQKSNEVWECLQEITEGYPVLLNRAPTLHKQSIQAFHPKLIDGKAIQLHPLVCSAFNADFDGDQMAVHVPLSQEAIAECKVLMLSSMNILLPASGKAVAIPSQDMVLGLYYLSLEKSGVKGEHKLFSSVNEIITAIDTKELDIHAKIRVLDQGNIIATSAGRMIIKSILPDFIPTDLWNRPMKKKDIGVLVDYVHKVGGIGITATFLDNLKTLGFRYATKAGISISMEDIITPKDKQKMVEKAKVEVKKIQQQYDQGLLTDQERYNKIIDTWTEVNDKMSKEMMTAIAQDKEGFNSIYMMADSGARGSAAQIRQLSAMRGLMTKPDGSIIETPIISNFKEGLNVLEYFNSTHGARKGLADTALKTANAGYLTRKLIDVSQNVKVVSDDCGTHEGIEITDIAVGSELIEPLEERIFGRVLLEDVIDPITNEILLYADTLIDEEGAKKVVEAGIKSITIRTPVTCKAPKGVCAKCYGLNLGEGKMSYPGEAVGVVAAQSIGEPGTQLTLRTFHVGGTASRSQDEREIVASKEGFVRFYNLRTYTNKEGKNIIANRRNASILVVEPKIKAPFDGELRIETVYEEVVVSVKNGDQEAKFVLRRSDIVKPSELAGVGGKIEGKVYLPYASGHKVHKGGSIADIIQEGWNVPNRIPYASELLVKDNDPIAQDVYAKEKGVIKYYVLEANHLERTHGIKKGDMVSEKGLFAVIADDNGREAARHYIARGSEILIDDNSEVSTNSVISKPTTNTFKTIATWDPYNTPIIADFKGKVGFVDVIAGVTVAEKEDENTGITSLVVNDYIPSGYKPSLFLEGANGEEMRYFLEPKTSIAISDGSSVEQAEVLAKIPKATVKSRDITGGLPRVSELFEARKPKPKDVAILSEVDGIVSFGKPIRNKEHIIVTSKDGRSMDYFVDKGKQILVHADEFVHAGEAMTDGVISSHDILRISGEKELYKYIVSEVQQVYRRQGVSIADKHIEIIVSQMLRQVRILDSGDSKFIEGDLVSKKLFKEENARVIALKGEPAIAEPVLLGITRAAIGSDSIISAASFQETTKVLTEASIAMKKDFLEDLKENVVLGRMIPVGTGMYKNKKIVLRALEDNSKF

SEQ ID NO: 33 - protein, 2890 aa, H. pylori
MSKKIPLKNRLRADFTKTPTDLEVPNLLLLQRDSYDSFLYSKEGKESGIEKVFKSIFPIQDEHNRITLEYAGCEFGKSKYTVREAMERGITYSIPLKIKVRLILWEKDTKSGEKNGIKDIKEQSIFIREIPLMTERTSFIINGVERVVVNQLHRSPGVIFKEEESSTSLNKLIYTGQIIPDRGSWLYFEYDSKDVLYARINKRRKVPVTILFRAMDYQKQDIIKMFYPLVKVRYENDKYLIPFASLDANQRMEFDLKDPQGKVILLAGKKLTSRKIKELKENHLEWVEYPMDILLNRHLAEPVMVGKEVLLDMLTQLDKNKLEKIHDLGVQEFVIINDLALGHDASIIQSFSADSESLKLLKQTEKIDDENALAAIRIHKVMKPGDPVTTEVAKQFVKKLFFDPERYDLTMVGRMKMNHKLGLHVPDYITTLTHEDIITTVKYLMKIKNNQGKIDDRDHLGNRRIRAVGELLANELHSGLVKMQKTIKDKLTTMSGAFDSLMPHDLVNSKMITSTIMEFFMGGQLSRFMNQTNPLSEVTNKRRLSALGEGGLVKDRVGFEARDVHPTHYGRICPIETPEGQNIGLLNTLSTFTRVNDLGFIEAPYKKVVDGKVVGETIYLTAIQEDSHIIAPASTPIDEEGNILGDLIETRVEGEIVLNEKSKVTLMDLSSSMLVGVAASLIPFLEHDDANRALMGTNMQRQAVPLLRSDAPIVGTGIEKIIARDSWGAIKANRAGVVEKIDSKNIYILGESKEEAYIDAYSLQKNLRTNQNTSFNQVPIVKVGDKVGAGQIIADGPSMDRGELALGKNVRVAFMPWNGYNFEDAIVVSECITKDDIFTSTHIYEKEVDARELKHGVEEFTADIPDVKEEALAHLDESGIVKVGTYVSAGMILVGKTSPKGEIKSTPEERLLRAIFGDKAGHVVNKSLYCPPSLEGTVIDVKVFTKKGYEKDARVLSAYEEEKAKLDMEHFDRLTMLNREELLRVSSLLSQAILEEPFSHNGKDYKEGDQIPKEEIASINRFTLASLVKKYSKEVQNHYEITKNNFLEQKKVLGEEHEEKLSILEKDDILPNGVIKKVKLYIATKRKLKVGDKMAGRHGNKGIVSNIVPVADMPYTADGEPVDIVLNPLGVPSRMNIGQILEMHLGLVGKEFGKQIARMLEDKTKDFAKELRAKMLEIANAINEKDPLTIHALENCSDEELLEYAKDWSKGVKMAIPVFEGISQEKFYKLFELAKIAMDGKMDLYDGRTGEKMRERVNVGYMYMIKLHHLVDEKVHARSTGPYSLVTHQPVGGKALFGGQRFGEMEVWALEAYGAAHTLKEMLTIKSDDIRGRENAYRAIAKGEQVGESEIPETFYVLTKELQSLALDINIFGDDVDEDGAPKPIVIKEDDRPKDFSSFQLTLASPEKIHSWSYGEVKKPETINYRTLKPERDGLFCMKIFGPTKDYECLCGKYKKPRFKDIGTCEKCGVAITHSKVRRFRMGHIELATPVAHIWYVNSLPSRIGTLLGVKMKDLERVLYYEAYIVKEPGEAAYDNEGTKLVMKYDILNEEQYQNISRRYEDRGFVAQMGGEAIKDLLEEIDLITLLQSLKEEVKDTNSDAKKKKLIKRLKVVESFLNSGNRPEWMMLTVLPVLPPDLRPLVALDGGKFAVSDVNELYRRVINRNQRLKRLMELGAPEIIVRNEKRMLQEAVDVLFDNGRSTNAVKGANKRPLKSLSEIIKGKQGRFRQNLLGKRVDFSGRSVIVVGPNLKMDECGLPKNMALELFKPHLLSKLEERGYATTLKQAKRMIEQKSNEVWECLQEITEGYPVLLNRAPTLHKQSIQAFHPKLIDGKAIQLHPLVCSAFNADFDGDQMAVHVPLSQEAIAECKVLMLSSMNILLPASGKAVAIPSQDMVLGLYYLSLEKSGVKGEHKLFSSVNEIITAIDTKELDIHAKIRVLDQGNIIATSAGRMIIKSILPDFIPTDLWNRPMKKKDIGVLVDYVHKVGGIGITATFLDNLKTLGFRYATKAGISISMEDIITPKDKQKMVEKAKVEVKKIQQQYDQGLLTDQERYNKIIDTWTEVNDKMSKEMMTAIAQDKEGFNSIYMMADSGARGSAAQIRQLSAMRGLMTKPDGSIIETPIISNFKEGLNVLEYFNSTHGARKGLADTALKTANAGYLTRKLIDVSQNVKVVSDDCGTHEGIEITDIAVGSELIEPLEERIFGRVLLEDVIDPITNEILLYADTLIDEEGAKKVVEAGIKSITIRTPVTCKAPKGVCAKCYGLNLGEGKMSYPGEAVGVVAAQSIGEPGTQLTLRTFHVGGTASRSQDEREIVASKEGFVRFYNLRTYTNKEGKNIIANRRNASILVVEPKIKAPFDGELRIETVYEEVVVSVKNGDQEAKFVLRRSDIVKPSELAGVGGKIEGKVYLPYASGHKVHKGGSIADIIQEGWNVPNRIPYASELLVKDNDPIAQDVYAKEKGVIKYYVLEANHLERTHGIKKGDMVSEKGLFAVIADDNGREAARHYIARGSEILIDDNSEVSTNSVISKPTTNTFKTIATWDPYNTPIIADFKGKVGFVDVIAGVTVAEKEDENTGITSLVVNDYIPSGYKPSLFLEGANGEEMRYFLEPKTSIAISDGSSVEQAEVLAKIPKATVKSRDITGGLPRVSELFEARKPKPKDVAILSEVDGIVSFGKPIRNKEHIIVTSKDGRSMDYFVDKGKQILVHADEFVHAGEAMTDGVISSHDILRISGEKELYKYIVSEVQQVYRRQGVSIADKHIEIIVSQMLRQVRILDSGDSKFIEGDLVSKKLFKEENARVIALKGEPAIAEPVLLGITRAAIGSDSIISAASFQETTKVLTEASIAMKKDFLEDLKENVVLGRMIPVGTGMYKNKKIVLRALEDNSKF

SEQ ID NO: 34 - protein, 1252 aa, C. trachomatis
MFKCPERVSIKKKEDILDLPNLVEVQIKSYKQFLQIGKLAEERENIGLEEVFREIFPIKSYNEATILEYLSYNLGVPKYSPEECIRRGITYSVTLKVRFRLTDETGIKEEEVYMGTIPIMTDKGTFIINGAERVVVSQVHRSPGINFEQEKHSKGNVLFSFRIIPYRGSWLEAVFDINDLIYIHIDRKKRRRKILAMTFIRALGYSTDADIIEEFFSVEERSLRLEKDFVALVGKVLADNVVDADSSLVYGKAGEKLSTAMLKRILDAGVQSLKIAVGADENHPIIKMLAKDPTDSYEAALKDFYRRLRPGEPATLVNARSTIMRLFFDAKRYNLGRVGRYKLNKKLGFPLDDETLSQVTLRKEDVIGALKYLIRLRMGDEKTSIDDIDHLANRRVRSVGELIQNHCRSGLARMEKIVRERMNLFDFSSDTLTPGKIISAKGLVSVLKDFFSRSQLSQFMDQTNPVAELTHKRRLSALGPGGLNRERAGFEVRDVHASHYGRICPIETPEGPNIGLITSLSSFAKINEFGFIETPYRVVRDGIVTDEIEYMTADVEEECVIAQASAELDEYDMFKTPVCWARYKGEAFEADTSTVTHMDVSPKQLVSVVTGLIPFLEHDDANRALMGSNMQRQAVPLLKTEAAIVGTGLEGRAAKDSGAIIVAQEDGVVEYVDSYEIVVAKKNNPTLKDRYQLKKFLRSNSGTCINQTPLCSVGDVVTHGDVLADGPATDKGELALGKNVLVAFMPWYGYNFEDAIIISERLIKQDAYTSIYIEEFELTARDTKLGKEEITRDIPNVSEEVLANLGEDGVVRIGAEVKPGDILVGKITPKSETELAPEERLLRAIFGEKAADVKDASLTVPPGTEGVVMDVKVFSRKDRLSKSDDELVEEAVHLKDLQKEYKSQLAQLKVEHREKLGALLLNEKAPAAIIHRRSADILVQEGAIFDQETIELLERESLVDLLMAPCDMYDVLKDILSSYETAVQRLEVNYKTEAEHIKEGDADLDHGVIRQVKVYVASKRKLQVGDKMAGRHGNKGVVSKIVPEADMPFLANGETVQMILNPLGVPSRMNLGQVLETHLGYAAKTAGIYVKTPVFEGFPESRIWDMMIEQGLPEDGKSYLFDGKTGERFDSKVVVGYIYMLKLSHLIADKIHARSIGPYSLVTQQPLGGKAQMGGQRFGEMEVWALEAYGVAHMLQEILTVKSDDVSGRTRIYESIVKGENLLRSGTPESFNVLIKEMQGLGLDVRPMVVDA

SEQ ID NO: 35 - protein, 1252 aa, C. trachomatis
MFKCPERVSIKKKEDILDLPNLVEVQIKSYKQFLQIGKLAEERENIGLEEVFREIFPIKSYNEATILEYLSYNLGVPKYSPEECIRRGITYSVTLKVRFRLTDETGIKEEEVYMGTIPIMTDKGTFIINGAERVVVSQVHRSPGINFEQEKHSKGNVLFSFRIIPYRGSWLEAVFDINDLIYIHIDRKKRRRKILAMTFIRALGYSTDADIIEEFFSVEERSLRLEKDFVALVGKVLADNVVDADSSLVYGKAGEKLSTAMLKRILDAGVQSLKIAVGADENHPIIKMLAKDPTDSYEAALKDFYRRLRPGEPATLVNARSTIMRLFFDAKRYNLGRVGRYKLNKKLGFPLDDETLSQVTLRKEDVIGALKYLIRLRMGDEKTSIDDIDHLANRRVRSVGELIQNHCRSGLARMEKIVRERMNLFDFSSDTLTPGKIISAKGLVSVLKDFFSPSQLSQFMDQTNPVAELTNKRRLSALGPGGLNRERAGFEVRDVHASHYGRICPIETPEGPNIGLMTSLSSFAKINEFGFIETPYRVVRDGIVTDEIEYMTADVEEECVIAQASAELDEYDMFKTPVCWARYKGEAFEADTSTVTHMDVSPKQLVSVVTGLIPFLEHDDANRALMGSNMQRQAVPLLKTEAAIVGTGLEGRAAKDSGAIIVAQEDGVVEYVDSYEIVVAKKNNPTLKDRYQLKKFLRSNSGTCINQTPLCSVGDVVTHGDVLADGPATDKGELALGKNVLVAFMPWYGYNFEDAIIISERLIKQDAYTSIYIEEFELTARDTKLGKEEITRDIPNVSEEVLANLGEDGVVRIGAEVKPGDILVGKITPKSETELAPEERLLRAIFGEKAADVKDASLTVPPGTEGVVMDVKVFSRKDRLSKSDDELVEEAVHLKDLQKEYKSQLAQLKVEHREKLGALLLNEKAPAAIIHRRSADILVQEGAIFDQETIELLERESLVDLLMAPCDMYDVLKDILSSYETAVQRLEVNYKTEAEHIKEGDADLDHGVIRQVKVYVASKRKLQVGDKMAGRHGNKGVVSKIVPEADMPFLANGETVQMILNPLGVPSRMNLGQVLETHLGYAAKTAGIYVKTPVFEGFPESRIWDMMIEQGLPEDGKSYLFDGKTGERFDSKVVVGYIYMLKLSHLIADKIHARSIGPYSLVTQQPLGGKAQMGGQRFGEMEVWALEAYGVAHMLQEILTVKSDDVSGRTRIYESIVKGENLLRSGTPESFNVLIKEMQGLGLDVRPMVVDA

SEQ ID NO: 36 - protein, 1252 aa, C. trachomatis
MFKCPERVSIKKKEDILDLPNLVEVQIKSYKQFLQIGKLAEERENIGLEEVFREIFPIKSYNEATILEYLSYNLGVPKYSPEECIRRGITYSVTLKVRFRLTDETGIKEEEVYMGTIPIMTDKGTFIINGAERVVVSQVHRSPGINFEQEKHSKGNVLFSFRIIPYRGSWLEAVFDINDLIYIHIDRKKRRRKILAMTFIRALGYSTDADIIEEFFSVEERSLRLEKDFVALVGKVLADNVVDADSSLVYGKAGEKLSTAMLKRILDAGVQSLKIAVGADENHPIIKMLAKDPTDSYEAALKDFYRRLRPGEPATLVNARSTIMRLFFDAKRYNLGRVGRYKLNKKLGFPLDDETLSQVTLRKEDVIGALKYLIRLRMGDEKTSIDDIDHLANRRVRSVGELIQNHCRSGLARMEKIVRERMNLFDFSSDTLTPGKIISAKGLVSVLKDFFSRSQLSQFMDQTNPVVELTYKRRLSALGPGGLNRERAGFEVRDVHASHYGRICPIETPEGPNIGLITSLSSFAKINEFGFIETPYRVVRDGIVTDEIEYMTADVEEECVIAQASAELDEYDMFKTPVCWARYKGEAFEADTSTVTHMDVSPKQLVSVVTGLIPFLEHDDANRALMGSNMQRQAVPLLKTEAAIVGTGLEGRAAKDSGAIIVAQEDGVVEYVDSYEIVVAKKNNPTLKDRYQLKKFLRSNSGTCINQTPLCSVGDVVTHGDVLADGPATDKGELALGKNVLVAFMPWYGYNFEDAIIISERLIKQDAYTSIYIEEFELTARDTKLGKEEITRDIPNVSEEVLANLGEDGVVRIGAEVKPGDILVGKITPKSETELAPEERLLRAIFGEKAADVKDASLTVPPGTEGVVMDVKVFSRKDRLSKSDDELVEEAVHLKDLQKEYKSQLAQLKVEHREKLGALLLNEKAPAAIIHRRSADILVQEGAIFDQETIELLERESLVDLLMAPCDMYDVLKDILSSYETAVQRLEVNYKTEAEHIKEGDADLDHGVIRQVKVYVASKRKLQVGDKMAGRHGNKGVVSKIVPEADMPFLANGETVQMILNPLGVPSRMNLGQVLETHLGYAAKTAGIYVKTPVFEGFPESRIWDMMIEQGLPEDGKSYLFDGKTGERFDSKVVVGYIYMLKLSHLIADKIHARSIGPYSLVTQQPLGGKAQMGGQRFGEMEVWALEAYGVAHMLQEILTVKSDDVSGRTRIYESIVKGENLLRSGTPESFNVLIKEMQGLGLDVRPMVVDA

SEQ ID NO: 37 - protein, 1343 aa, H. influenzae
MGYSYSEKKRIRKDFGKRPQVLNVPYLLTIQLDSFDKFIQKDPEGQQGLEAAFRSVFPIVSNNGYTELQYVDYRLEEPEFDVRECQIRGSTYAAGLRVKLRLVSYDKESSSRAVKDIKENEVYMGEIPLMTDNGTFVINGTERVIVSQLHRSPGVFFDSDKGKTHSSGKVLYNARIIPYRGSWLDFEFDPKDNLFARIDRRRKLPATIILRALGYTTEEILNLFFDKITFEIAGDKLLMTLVPERLRGETASFDIEANGKVYVERGRRITARHIKALEKDNISQVVVPSEYILGKVASKDYVDLESGEIICPANGEISLETLAKLAQAGYTTIETLFTNDLDYGPYISETLRVDPTYDKTSALYEIYRMMRPGEPPTPESSEALFNNLFFSAERYDLSTVGRMKFNRSLAFPEGEGAGILSNEDIIAVMRKLIDIRNGRGEVDDIDHLGNRRIRSVGEMAENQFRIGLVRVERAVKERLSLGDLDAITPQDLINPKPISAAVKEFFGSSQLSQFMDQNNPLSEVTHKRRISALGPGGLTRERAGFEVRDVHNTHYGRLCPIETPEGPNIGLINSLSAFARTNDYGFLETPYRKVVDGQVTEEIEYLSVIDEANYIIAQANSNLDENNRFTDAFVTARGERGESGLYKPEDIHYMDVSTQQVVSVAAALIPFLEHDDANRALMGANMQRQAVPTLRADKPLVGTGMEKPIALDSGVAVVAKRGGTVQYVDASRIVIKVNEDETIAGEAGIDIYNLIKYTRSNQNTCINQIPCVNLGDPINRGEVLADGPSTDLGELALGQNIRVAFMPWNGYNFEDSMLVSERVVQQDRFTTIHIQELSCVARDTKLGAEEITADIPNVGESALSKLDESGIVYVGAEVKGGDILVGKVTPKGETQLTPEEKLLRAIFGEKASDVKDSSLRVPNGTSGTVIDVQVFTRDGVEKDKRALEIEEMQLREAKKDLTEELEILEAGLFARVRNLLISSGADAAQLDKLDRTKWLEQTIADEEKQNQLEQLAEQYEELRKEFEHKLEVKRKKIIKGDDLAPGVLKVVKVYLAVKRQIQPGDKMAGRHGNKGVISKINPVEDMPYDENGQPVEIVLNPLGVPSRMNIGQILETHLGLAAKGIGDQINAMLKQKQEVEKLRSYIQKAYDLLGNGSQKVDLSTFTDEEVLRLAGNLRKGLPVATPVFDGADEAEIKELLKLGGLPTSGQITLYDGRTGEKFERPVTVGYMYMLKLNHLVDDKMHARSTGSYSLVTQQPLGGKAQFGGQRFGEMEVWALEAYGAAYTLQEMLTVKSDDVNGRTKMYKNIVSGNQHMEPGTPESFNVIMKEIRSLGLNIELDEE

SEQ ID NO: 38 - protein, 1343 aa, H. influenzae
MGYSYSEKKRIRKDFGKRPQVLNVPYLLTIQLDSFDKFIQKDPEGQQGLEAAFRSVFPIVSNNGYTELQYVDYRLEEPEFDVRECQIRGSTYAAGLRVKLRLVSYDKESSSRAVKDIKENEVYMGEIPLMTDNGTFVINGTERVIVSQLHRSPGVFFDSDKGKTHSSGKVLYNARIIPYRGSWLDFEFDPKDNLFARIDRRRKLPATIILRALGYTTEEILNLFFDKITFEIAGDKLLMTLVPERLRGETASFDIEANGKVYVERGRRITARHIKALEKDNISQVVVPSEYILGKVASKDYVDLESGEIICPANGEISLETLAKLAQAGYTTIETLFTNDLDYGPYISETLRVDPTYDKTSALYEIYRMMRPGEPPTPESSEALFNNLFFSAERYDLSTVGRMKFNRSLAFPEGEGAGILSNEDIIAVMRKLIDIRNGRGEVDDIDHLGNRRIRSVGEMAENQFRIGLVRVERAVKERLSLGDLDAITPQDLINPKPISAAVKEFFGSSQLSLFMAQNNPLSEVTLKRRISASGPGGLTRERAGFEVRDVHNTHYGRLCPIETPEGPNIGLNNSLSAFARTNDYGFLETPYRKVVDGQVTEEIEYLSVIDEANYIIAQANSNLDENNRFTDAFVTARGERGESGLYKPEDIHYMDVSTQQVVSVAAALIPFLEHDDANRALMGANMQRQAVPTLRADKPLVGTGMEKPIALDSGVAVVAKRGGTVQYVDASRIVIKVNEDETIAGEAGIDIYNLIKYTRSNQNTCINQIPCVNLGDPINRGEVLADGPSTDLGELALGQNIRVAFMPWNGYNFEDSMLVSERVVQQDRFTTIHIQELSCVARDTKLGAEEITADIPNVGESALSKLDESGIVYVGAEVKGGDILVGKVTPKGETQLTPEEKLLRAIFGEKASDVKDSSLRVPNGTSGTVIDVQVFTRDGVEKDKRALEIEEMQLREAKKDLTEELEILEAGLFARVRNLLISSGADAAQLDKLDRTKWLEQTIADEEKQNQLEQLAEQYEELRKEFEHKLEVKRKKIIKGDDLAPGVLKVVKVYLAVKRQIQPGDKMAGRHGNKGVISKINPVEDMPYDENGQPVEIVLNPLGVPSRMNIGQILETHLGLAAKGIGDQINAMLKQKQEVEKLRSYIQKAYDLLGNGSQKVDLSTFTDEEVLRLAGNLRKGLPVATPVFDGADEAEIKELLKLGGLPTSGQITLYDGRTGEKFERPVTVGYMYMLKLNHLVDDKMHARSTGSYSLVTQQPLGGKAQFGGQRFGEMEVWALEAYGAAYTLQEMLTVKSDDVNGRTKMYKNIVSGNQHMEPGTPESFNVIMKEIRSLGLNIELDEE

SEQ ID NO: 39 - protein, 1343 aa, H. influenzae
MGYSYSEKKRIRKDFGKRPQVLNVPYLLTIQLDSFDKFIQKDPEGQQGLEAAFRSVFPIVSNNGYTELQYVDYRLEEPEFDVRECQIRGSTYAAGLRVKLRLVSYDKESSSRAVKDIKENEVYMGEIPLMTDNGTFVINGTERVIVSQLHRSPGVFFDSDKGKTHSSGKVLYNARIIPYRGSWLDFEFDPKDNLFARIDRRRKLPATIILRALGYTTEEILNLFFDKITFEIAGDKLLMTLVPERLRGETASFDIEANGKVYVERGRRITARHIKALEKDNISQVVVPSEYILGKVASKDYVDLESGEIICPANGEISLETLAKLAQAGYTTIETLFTNDLDYGPYISETLRVDPTYDKTSALYEIYRMMRPGEPPTPESSEALFNNLFFSAERYDLSTVGRMKFNRSLAFPEGEGAGILSNEDIIAVMRKLIDIRNGRGEVDDIDHLGNRRIRSVGEMAENQFRIGLVRVERAVKERLSLGDLDAITPQDLINPKPISAAVKEFFGSSQLSQFMVQNNPLSEVTHKRRISALGPGGLTRERAGFEVRDVHNTHYGRLCPIETPEGPNIGLINSLSAFARTNDYGFLETPYRKVVDGQVTEEIEYLSVIDEANYIIAQANSNLDENNRFTDAFVTARGERGESGLYKPEDIHYMDVSTQQVVSVAAALIPFLEHDDANRALMGANMQRQAVPTLRADKPLVGTGMEKPIALDSGVAVVAKRGGTVQYVDASRIVIKVNEDETIAGEAGIDIYNLIKYTRSNQNTCINQIPCVNLGDPINRGEVLADGPSTDLGELALGQNIRVAFMPWNGYNFEDSMLVSERVVQQDRFTTIHIQELSCVARDTKLGAEEITADIPNVGESALSKLDESGIVYVGAEVKGGDILVGKVTPKGETQLTPEEKLLRAIFGEKASDVKDSSLRVPNGTSGTVIDVQVFTRDGVEKDKRALEIEEMQLREAKKDLTEELEILEAGLFARVRNLLISSGADAAQLDKLDRTKWLEQTIADEEKQNQLEQLAEQYEELRKEFEHKLEVKRKKIIKGDDLAPGVLKVVKVYLAVKRQIQPGDKMAGRHGNKGVISKINPVEDMPYDENGQPVEIVLNPLGVPSRMNIGQILETHLGLAAKGIGDQINAMLKQKQEVEKLRSYIQKAYDLLGNGSQKVDLSTFTDEEVLRLAGNLRKGLPVATPVFDGADEAEIKELLKLGGLPTSGQITLYDGRTGEKFERPVTVGYMYMLKLNHLVDDKMHARSTGSYSLVTQQPLGGKAQFGGQRFGEMEVWALEAYGAAYTLQEMLTVKSDDVNGRTKMYKNIVSGNQHMEPGTPESFNVIMKEIRSLGLNIELDEE

SEQ ID NO: 40 - protein, 1343 aa, H. influenzae
MGYSYSEKKRIRKDFGKRPQVLNVPYLLTIQLDSFDKFIQKDPEGQQGLEAAFRSVFPIVSNNGYTELQYVDYRLEEPEFDVRECQIRGSTYAAGLRVKLRLVSYDKESSSRAVKDIKENEVYMGEIPLMTDNGTFVINGTERVIVSQLHRSPGVFFDSDKGKTHSSGKVLYNARIIPYRGSWLDFEFDPKDNLFARIDRRRKLPATIILRALGYTTEEILNLFFDKITFEIAGDKLLMTLVPERLRGETASFDIEANGKVYVERGRRITARHIKALEKDNISQVVVPSEYILGKVASKDYVDLESGEIICPANGEISLETLAKLAQAGYTTIETLFTNDLDYGPYISETLRVDPTYDKTSALYEIYRMMRPGEPPTPESSEALFNNLFFSAERYDLSTVGRMKFNRSLAFPEGEGAGILSNEDIIAVMRKLIDIRNGRGEVDDIDHLGNRRIRSVGEMAENQFRIGLVRVERAVKERLSLGDLDAITPQDLINPKPISAAVKEFFGSSQLSQFMNQNNPLSEVTHKRRISALGPGGLTRERAGFEVRDVHNTHYGRLCPIETPEGPNIGLINSLSAFARTNDYGFLETPYRKVVDGQVTEEIEYLSVIDEANYIIAQANSNLDENNRFTDAFVTARGERGESGLYKPEDIHYMDVSTQQVVSVAAALIPFLEHDDANRALMGANMQRQAVPTLRADKPLVGTGMEKPIALDSGVAVVAKRGGTVQYVDASRIVIKVNEDETIAGEAGIDIYNLIKYTRSNQNTCINQIPCVNLGDPINRGEVLADGPSTDLGELALGQNIRVAFMPWNGYNFEDSMLVSERVVQQDRFTTIHIQELSCVARDTKLGAEEITADIPNVGESALSKLDESGIVYVGAEVKGGDILVGKVTPKGETQLTPEEKLLRAIFGEKASDVKDSSLRVPNGTSGTVIDVQVFTRDGVEKDKRALEIEEMQLREAKKDLTEELEILEAGLFARVRNLLISSGADAAQLDKLDRTKWLEQTIADEEKQNQLEQLAEQYEELRKEFEHKLEVKRKKIIKGDDLAPGVLKVVKVYLAVKRQIQPGDKMAGRHGNKGVISKINPVEDMPYDENGQPVEIVLNPLGVPSRMNIGQILETHLGLAAKGIGDQINAMLKQKQEVEKLRSYIQKAYDLLGNGSQKVDLSTFTDEEVLRLAGNLRKGLPVATPVFDGADEAEIKELLKLGGLPTSGQITLYDGRTGEKFERPVTVGYMYMLKLNHLVDDKMHARSTGSYSLVTQQPLGGKAQFGGQRFGEMEVWALEAYGAAYTLQEMLTVKSDDVNGRTKMYKNIVSGNQHMEPGTPESFNVIMKEIRSLGLNIELDEE

SEQ ID NO: 41 - protein, 1343 aa, H. influenzae
MGYSYSEKKRIRKDFGKRPQVLNVPYLLTIQLDSFDKFIQKDPEGQQGLEAAFRSVFPIVSNNGYTELQYVDYRLEEPEFDVRECQIRGSTYAAGLRVKLRLVSYDKESSSRAVKDIKENEVYMGEIPLMTDNGTFVINGTERVIVSQLHRSPGVFFDSDKGKTHSSGKVLYNARIIPYRGSWLDFEFDPKDNLFARIDRRRKLPATIILRALGYTTEEILNLFFDKITFEIAGDKLLMTLVPERLRGETASFDIEANGKVYVERGRRITARHIKALEKDNISQVVVPSEYILGKVASKDYVDLESGEIICPANGEISLETLAKLAQAGYTTIETLFTNDLDYGPYISETLRVDPTYDKTSALYEIYRMMRPGEPPTPESSEALFNNLFFSAERYDLSTVGRMKFNRSLAFPEGEGAGILSNEDIIAVMRKLIDIRNGRGEVDDIDHLGNRRIRSVGEMAENQFRIGLVRVERAVKERLSLGDLDAITPQDLINPKPISAAVKEFFGSSQLSQFMYQNNPLSEVTHKRRISALGPGGLTRERAGFEVRDVHNTHYGRLCPIETPEGPNIGLINSLSAFARTNDYGFLETPYRKVVDGQVTEEIEYLSVIDEANYIIAQANSNLDENNRFTDAFVTARGERGESGLYKPEDIHYMDVSTQQVVSVAAALIPFLEHDDANRALMGANMQRQAVPTLRADKPLVGTGMEKPIALDSGVAVVAKRGGTVQYVDASRIVIKVNEDETIAGEAGIDIYNLIKYTRSNQNTCINQIPCVNLGDPINRGEVLADGPSTDLGELALGQNIRVAFMPWNGYNFEDSMLVSERVVQQDRFTTIHIQELSCVARDTKLGAEEITADIPNVGESALSKLDESGIVYVGAEVKGGDILVGKVTPKGETQLTPEEKLLRAIFGEKASDVKDSSLRVPNGTSGTVIDVQVFTRDGVEKDKRALEIEEMQLREAKKDLTEELEILEAGLFARVRNLLISSGADAAQLDKLDRTKWLEQTIADEEKQNQLEQLAEQYEELRKEFEHKLEVKRKKIIKGDDLAPGVLKVVKVYLAVKRQIQPGDKMAGRHGNKGVISKINPVEDMPYDENGQPVEIVLNPLGVPSRMNIGQILETHLGLAAKGIGDQINAMLKQKQEVEKLRSYIQKAYDLLGNGSQKVDLSTFTDEEVLRLAGNLRKGLPVATPVFDGADEAEIKELLKLGGLPTSGQITLYDGRTGEKFERPVTVGYMYMLKLNHLVDDKMHARSTGSYSLVTQQPLGGKAQFGGQRFGEMEVWALEAYGAAYTLQEMLTVKSDDVNGRTKMYKNIVSGNQHMEPGTPESFNVIMKEIRSLGLNIELDEE

SEQ ID NO: 42 - protein, 1188 aa, S. pyogenes
MAGHEVRYGKHRTRRSFSRIKEVLDLPNLIEIQTDSFQDFLDSGLKEVFEDVLPISNFTDTMELEFVGYEFKEPKYTLEEARIHDASYSAPIFVTFRLVNKETGEIKTQEVFFGDFPIMTEMGTFIINGGERIIVSQLVRSPGVYFNDKVDKNGKVGYGSTVIPNRGAWLELETDSKDIAYTRIDRTRKIPFTTLVRALGFSGDDEIVDIFGESDLVRNTIEKDIHKNPSDSRTDEALKEIYERLRPGEPKTADSSRSLLIARFFDARRYDLAAVGRYKVNKKLNIKTRLLNQIIAENLVDAETGEILVEAGTEMTRSVIESIEEHLDGDLNKFVYTPNDYAVVTEPVVLQKFKVVSPIDPDRVVTIVGNANPDDKVRALTPADILAEMSYFLNLAEGLGKVDDIDHLGNRRIRAVGELLANQFRIGLARMERNVRERMSVQDNDVLTPQQIINIRPVTAAVKEFFGSSQLSQFMDQHNPLSELSHKRRLSALGPGGLTRDRAGYEVRDVHYTHYGRMCPIETPEGPNIGLINNLSSFGHLNKYGFIQTPYRKVDRATGRVTNEIVWLTADEEDEYTVAQANSKLNEDGTFAEEIVMGRHQGNNQEFSASVVDFVDVSPKQVVAVATACIPFLENDDSNRALMGANMQRQAVPLIDPKAPYVGTGMEYQAAHDSGAAVIAQHNGKVVFSDAEKVEIRRQDGSLDVYHITKFRRSNSGTAYNQRTLVKVGDIVEKGDFIADGPSMENGEMALGQNPVVAYMTWEGYNFEDAVIMSERLVKEDVYTSVHLEEFESETRDTKLGPEEITREIPNVGEEALKDLDEMGIIRIGAEVKEGDILVGKVTPKGEKDLSAEERLLHAIFGDKSREVRDTSLRVPHGGDGIVRDVKIFTRANGDELQSGVNMLVRVYIAQKRKIKVGDKMAGRHGNKGVVSRIVPVEDMPYLPDGTPVDIMLNPLGVPSRMNIGQVMELHLGMAARNLGIHIATPVFDGASSEDLWDTVREAGMDSDAKTVLYDGRTGEPFDNRVSVGVMYMIKLHHMVDDKLHARSVGPYSLVTQQPLGGKAQFGGQRFGEMEVWALEAYGASNVLQEILTYKSDDVTGRLKAYEAITKGKPIPKPGVPESFRVLVKELQSLGLDMRVLDEDDNEVELRDLDEGEDDDIMHVDDLEKAREKQAQETQEVSETTDEK

SEQ ID NO: 43 - protein, 1188 aa, S. pyogenes
MAGHEVRYGKHRTRRSFSRIKEVLDLPNLIEIQTDSFQDFLDSGLKEVFEDVLPISNFTDTMELEFVGYEFKEPKYTLEEARIHDASYSAPIFVTFRLVNKETGEIKTQEVFFGDFPIMTEMGTFIINGGERIIVSQLVRSPGVYFNDKVDKNGKVGYGSTVIPNRGAWLELETDSKDIAYTRIDRTRKIPFTTLVRALGFSGDDEIVDIFGESDLVRNTIEKDIHKNPSDSRTDEALKEIYERLRPGEPKTADSSRSLLIARFFDARRYDLAAVGRYKVNKKLNIKTRLLNQIIAENLVDAETGEILVEAGTEMTRSVIESIEEHLDGDLNKFVYTPNDYAVVTEPVVLQKFKVVSPIDPDRVVTIVGNANPDDKVRALTPADILAEMSYFLNLAEGLGKVDDIDHLGNRRIRAVGELLANQFRIGLARMERNVRERMSVQDNDVLTPQQIINIRPVTAAVKEFFGSSQLSQFMDQHNPLLELSNKRRLSALGPGGLTRDRAGYEVRDVHYTHYGRMCPIETPEGPNIGLINNLSSFGHLNKYGFIQTPYRKVDRATGRVTNEIVWLTADEEDEYTVAQANSKLNEDGTFAEEIVMGRHQGNNQEFSASVVDFVDVSPKQVVAVATACIPFLENDDSNRALMGANMQRQAVPLIDPKAPYVGTGMEYQAAHDSGAAVIAQHNGKVVFSDAEKVEIRRQDGSLDVYHITKFRRSNSGTAYNQRTLVKVGDIVEKGDFIADGPSMENGEMALGQNPVVAYMTWEGYNFEDAVIMSERLVKEDVYTSVHLEEFESETRDTKLGPEEITREIPNVGEEALKDLDEMGIIRIGAEVKEGDILVGKVTPKGEKDLSAEERLLHAIFGDKSREVRDTSLRVPHGGDGIVRDVKIFTRANGDELQSGVNMLVRVYIAQKRKIKVGDKMAGRHGNKGVVSRIVPVEDMPYLPDGTPVDIMLNPLGVPSRMNIGQVMELHLGMAARNLGIHIATPVFDGASSEDLWDTVREAGMDSDAKTVLYDGRTGEPFDNRVSVGVMYMIKLHHMVDDKLHARSVGPYSLVTQQPLGGKAQFGGQRFGEMEVWALEAYGASNVLQEILTYKSDDVTGRLKAYEAITKGKPIPKPGVPESFRVLVKELQSLGLDMRVLDEDDNEVELRDLDEGEDDDIMHVDDLEKAREKQAQETQEVSETTDEK

SEQ ID NO: 44 - protein, 1216 aa, S. pneumoniae
MTRLGTYLQRRIILAGHDVQYGKHRTRRSFSRIKEVLDLPNLIEIQTDSFKAFLDHGLKEVFEDVLPISNFTDTMELEFVGYEIKEPKYTLEEARIHDASYSAPIFVTFRLINKETGEIKTQEVFFGDFPIMTEMGTFIINGGERIIVSQLVRSPGVYFNDKVDKNGKVGYGSTVIPNRGAWLELESDSKDITYTRIDRTRKIPFTTLVRALGFSGDDEIFDIFGDSELVRNTVEKDIHKNPMDSRTDEALKEIYERLRPGEPKTAESSRSLLVARFFDPRRYDLAAVGRYKINKKLNVKTRLLNQTIAEPLVDPETGEILVEAGTIMTRSVIESIESHLDGDLNKIVYIPNDAAVVTEPVVLQKFKVVAPTDPDRVVTIIGNANPDDKVRTVTPADILAEMSYFLNLAEGLGRVDDIDHLGNRRIRAVGELLANQVRLGLSRMERNVRERMSVQDNEVLTPQQIINIRPVTAAVKEFFGSSQLSQFMDQHNPLSELSHKRRLSALGPGGLTRDRAGYEVRDVHYTHYGRMCPIETPEGPNIGLINNLSSYGHLNKYGFVQTPYRKVDRETGVVTNEIVWLTADEEDEYTVAQANSRLNEDGTFAEKIVMGRHQGVNQEYPANIVDYMDVSPKQVVAVATACIPFLENDDSNRALMGANMQRQAVPLINPQAPYVGTGMEYQAAHDSGAAVIAQYDGKVTYADADKVEVRREDGSLDVYHIQKFRRSNSGTAYNQRTLVKVGDVVEKGDFIADGPSMENGEMALGQNPIVAYMTWEGYNFEDAVIMSERLVKDDVYTSVHLEEYESETRDTKLGPEEITREIPNVGEDALKDLDEMGIIRIGAEVKEGDILVGKVTPKGEKDLSAEERLLHAIFGDKSREVRDTSLRVPHGADGVVRDVKIFTRVNGDELQSGVNMLVRVYIAQKRKIKVGDKMAGRHGNKGVVSRIVPVEDMPYLPDGTPVDIMLNPLGVPSRMNIGQVMELHLGMAARTLGIHIATPVFDGASSEDLWSTVKEAGMDSDAKTILYDGRTGEPFDNRVSVGVMYMIKLHHMVDDKLHARSVGPYSTVTQQPLGGKAQFGGQRFGEMEVWALEAYGASNVLQEILTYKSDDINGRLKAYEAITKGKPIPKPGVPESFRVLVKELQSLGLDMRVLDEDDQEVELRDLDEGMDEDVIHVDDLEKAREKAAQEAKAAFEAEEAEKATKAEATEEAAEQE

SEQ ID NO: 45 - protein, 1216 aa, S. pneumoniae
MTRLGTYLQRRIILAGHDVQYGKHRTRRSFSRIKEVLDLPNLIEIQTDSFKAFLDHGLKEVFEDVLPISNFTDTMELEFVGYEIKEPKYTLEEARIHDASYSAPIFVTFRLINKETGEIKTQEVFFGDFPIMTEMGTFIINGGERIIVSQLVRSPGVYFNDKVDKNGKVGYGSTVIPNRGAWLELESDSKDITYTRIDRTRKIPFTTLVRALGFSGDDEIFDIFGDSELVRNTVEKDIHKNPMDSRTDEALKEIYERLRPGEPKTAESSRSLLVARFFDPRRYDLAAVGRYKINKKLNVKTRLLNQTIAEPLVDPETGEILVEAGTIMTRSVIESIESHLDGDLNKIVYIPNDAAVVTEPVVLQKFKVVAPTDPDRVVTIIGNANPDDKVRTVTPADILAEMSYFLNLAEGLGRVDDIDHLGNRRIRAVGELLANQVRLGLSRMERNVRERMSVQDNEVLTPQQIINIRPVTAAVKEFFGSSQLSQFMDQHNPLSELSNKRRLSALGPGGLTRDRAGYEVRDVHYTHYGRMCPIETPEGPNIGLINNLSSYGHLNKYGFVQTPYRKVDRETGVVTNEIVWLTADEEDEYTVAQANSRLNEDGTFAEKIVMGRHQGVNQEYPANIVDYMDVSPKQVVAVATACIPFLENDDSNRALMGANMQRQAVPLINPQAPYVGTGMEYQAAHDSGAAVIAQYDGKVTYADADKVEVRREDGSLDVYHIQKFRRSNSGTAYNQRTLVKVGDVVEKGDFIADGPSMENGEMALGQNPIVAYMTWEGYNFEDAVIMSERLVKDDVYTSVHLEEYESETRDTKLGPEEITREIPNVGEDALKDLDEMGIIRIGAEVKEGDILVGKVTPKGEKDLSAEERLLHAIFGDKSREVRDTSLRVPHGADGVVRDVKIFTRVNGDELQSGVNMLVRVYIAQKRKIKVGDKMAGRHGNKGVVSRIVPVEDMPYLPDGTPVDIMLNPLGVPSRMNIGQVMELHLGMAARTLGIHIATPVFDGASSEDLWSTVKEAGMDSDAKTILYDGRTGEPFDNRVSVGVMYMIKLHHMVDDKLHARSVGPYSTVTQQPLGGKAQFGGQRFGEMEVWALEAYGASNVLQEILTYKSDDINGRLKAYEAITKGKPIPKPGVPESFRVLVKELQSLGLDMRVLDEDDQEVELRDLDEGMDEDVIHVDDLEKAREKAAQEAKAAFEAEEAEKATKAEATEEAAEQE

SEQ ID NO: 46 - protein, 1208 aa, E. faecium
MKSLAGHVVKYGKHRERRSFARISEVLELPNLIEIQTDSYQWFLDEGLGEMFEDILPIDDFNGNLSLEFVDYELKEPKYTVAEARAHDANYSAPLHVTLRLTNRETGEIKAQEVFFGDFPLMTEQGTFIINGAERVIVSQLVRSPGVYFHGKVDKNGKEGFGSTVIPNRGAWLEMETSAKDISYVRIDRTRKIPLTVLVRALGFGSDDTIFEIFGDSETLRNTVEKDLHKNASDSRTEEGLKDVYERLRPGEPKTADSSRNLLNARFFDPKRYDLANVGRYKVNKKLDLKTRLLNLTLAETLVDPETGEIIVEKGTVLTHQVMETLAPFIDNGLNSVTYYPSEDGVVTDPMTVQVIKVFSPKDPEREVNVIGNGYPESAVKTVRPADIIASMSYFLNLMEGIGNVDDIDHLGNRRIRSVGELLQNQFRIGLARMERVVRERMSIQDTETLTPQQLINIRPVVASIKEFFGSSQLSQFMDQTNPLGELTHKRRLSALGPGGLTRDRAGYEVRDVHYSHYGRMCPIETPEGPNIGLINSLSSYAKVNKFGFIETPYRRVDRETGRVTDQIDYLTADIEDHYIVAQANSPLNEDGTFAQDVVMARAQSENLEVSIDKVDYMDVSPKQVVAVATACIPFLENDDSNRALMGANMQRQAVPLINPQAPWVGTGMEYKSAHDSGAALLCKHDGVVEFVDASEIRVRRDNGALDKYAVTKFRRSNSGTSYNQRPIVHLGEKVEKGDTLADGPSMEQGEMALGQNVLVGFMTWEGYNYEDAIIMSRRLVKDDVYTSIHIEEYESEARDTKLGPEEITREIPNVGEDALKDLDEMGIIRIGAEVQDGDLLVGKVTPKGVTELSAEERLLHAIFGEKAREVRDTSLRVPHGGGGIVHDVKIFTREAGDELSPGVNMLVRVYIVQKRKIHEGDKMAGRHGNKGVVSRIMPEEDMPFLPDGTPIDIMLNPLGVPSRMNIGQVLELHLGMAARQLGIHVATPVFDGASDEDVWETVREAGMASDAKTILYDGRTGEPFDGRVSVGVMYMIKLAHMVDDKLHARSIGPYSLVTQQPLGGKAQFGGQRFGEMEVWALEAYGAAYTLQEILTYKSDDVVGRVKTYEAIVKGEPIPKPGVPESFRVLVKELQSLGLDMRVLDIKDSEIQLRDMDDQDDDLITVNALTKFAEQQTAKELEKKAAEQVEDERQDIIQNFETAEDNLD

SEQ ID NO: 47 - protein, 1208 aa, E. faecium
MKSLAGHVVKYGKHRERRSFARISEVLELPNLIEIQTDSYQWFLDEGLGEMFEDILPIDDFNGNLSLEFVDYELKEPKYTVAEARAHDANYSAPLHVTLRLTNRETGEIKAQEVFFGDFPLMTEQGTFIINGAERVIVSQLVRSPGVYFHGKVDKNGKEGFGSTVIPNRGAWLEMETSAKDISYVRIDRTRKIPLTVLVRALGFGSDDTIFEIFGDSETLRNTVEKDLHKNASDSRTEEGLKDVYERLRPGEPKTADSSRNLLNARFFDPKRYDLANVGRYKVNKKLDLKTRLLNLTLAETLVDPETGEIIVEKGTVLTHQVMETLAPFIDNGLNSVTYYPSEDGVVTDPMTVQVIKVFSPKDPEREVNVIGNGYPESAVKTVRPADIIASMSYFLNLMEGIGNVDDIDHLGNRRIRSVGELLQNQFRIGLARMERVVRERMSIQDTETLTPQQLINIRPVVASIKEFFGSSQLSQFMDHTNPLGELTQKRHLSALGPGGLTRDRAGYEVRDVHYSHYGRMCPIETPEGPNIGLINSLSSYAKVNKFGFIETPYRRVDRETGRVTDQIDYLTADIEDHYIVAQANSPLNEDGTFAQDVVMARAQSENLEVSIDKVDYMDVSPKQVVAVATACIPFLENDDSNRALMGANMQRQAVPLINPQAPWVGTGMEYKSAHDSGAALLCKHDGVVEFVDASEIRVRRDNGALDKYAVTKFRRSNSGTSYNQRPIVHLGEKVEKGDTLADGPSMEQGEMALGQNVLVGFMTWEGYNYEDAIIMSRRLVKDDVYTSIHIEEYESEARDTKLGPEEITREIPNVGEDALKDLDEMGIIRIGAEVQDGDLLVGKVTPKGVTELSAEERLLHAIFGEKAREVRDTSLRVPHGGGGIVHDVKIFTREAGDELSPGVNMLVRVYIVQKRKIHEGDKMAGRHGNKGVVSRIMPEEDMPFLPDGTPIDIMLNPLGVPSRMNIGQVLELHLGMAARQLGIHVATPVFDGASDEDVWETVREAGMASDAKTILYDGRTGEPFDGRVSVGVMYMIKLAHMVDDKLHARSIGPYSLVTQQPLGGKAQFGGQRFGEMEVWALEAYGAAYTLQEILTYKSDDVVGRVKTYEAIVKGEPIPKPGVPESFRVLVKELQSLGLDMRVLDIKDSEIQLRDMDDQDDDLITVNALTKFAEQQTAKELEKKAAEQVEDERQDIIQNFETAEDNLD

SEQ ID NO: 48 - protein, 1208 aa, E. faecium
MKSLAGHVVKYGKHRERRSFARISEVLELPNLIEIQTDSYQWFLDEGLGEMFEDILPIDDFNGNLSLEFVDYELKEPKYTVAEARAHDANYSAPLHVTLRLTNRETGEIKAQEVFFGDFPLMTEQGTFIINGAERVIVSQLVRSPGVYFHGKVDKNGKEGFGSTVIPNRGAWLEMETSAKDISYVRIDRTRKIPLTVLVRALGFGSDDTIFEIFGDSETLRNTVEKDLHKNASDSRTEEGLKDVYERLRPGEPKTADSSRNLLNARFFDPKRYDLANVGRYKVNKKLDLKTRLLNLTLAETLVDPETGEIIVEKGTVLTHQVMETLAPFIDNGLNSVTYYPSEDGVVTDPMTVQVIKVFSPKDPEREVNVIGNGYPESAVKTVRPADIIASMSYFLNLMEGIGNVDDIDHLGNRRIRSVGELLQNQFRIGLARMERVVRERMSIQDTETLTPQQLINIRPVVASIKEFFGSSQLSQFMDQTNPLGELTYKRRLSALGPGGLTRDRAGYEVRDVHYSHYGRMCPIETPEGPNIGLINSLSSYAKVNKFGFIETPYRRVDRETGRVTDQIDYLTADIEDHYIVAQANSPLNEDGTFAQDVVMARAQSENLEVSIDKVDYMDVSPKQVVAVATACIPFLENDDSNRALMGANMQRQAVPLINPQAPWVGTGMEYKSAHDSGAALLCKHDGVVEFVDASEIRVRRDNGALDKYAVTKFRRSNSGTSYNQRPIVHLGEKVEKGDTLADGPSMEQGEMALGQNVLVGFMTWEGYNYEDAIIMSRRLVKDDVYTSIHIEEYESEARDTKLGPEEITREIPNVGEDALKDLDEMGIIRIGAEVQDGDLLVGKVTPKGVTELSAEERLLHAIFGEKAREVRDTSLRVPHGGGGIVHDVKIFTREAGDELSPGVNMLVRVYIVQKRKIHEGDKMAGRHGNKGVVSRIMPEEDMPFLPDGTPIDIMLNPLGVPSRMNIGQVLELHLGMAARQLGIHVATPVFDGASDEDVWETVREAGMASDAKTILYDGRTGEPFDGRVSVGVMYMIKLAHMVDDKLHARSIGPYSLVTQQPLGGKAQFGGQRFGEMEVWALEAYGAAYTLQEILTYKSDDVVGRVKTYEAIVKGEPIPKPGVPESFRVLVKELQSLGLDMRVLDIKDSEIQLRDMDDQDDDLITVNALTKFAEQQTAKELEKKAAEQVEDERQDIIQNFETAEDNLD

SEQ ID NO: 49 - protein, 1184 aa, L. monocytogenes
MSGHSGHDVKYGRHRTRRSFARISEVLELPNLIEIQTASYQWFLDEGLREMFRDISPIEDFAGNLSLEFIDYDLGEPKYSVEESKNRDANYAAPLRVKLRLINKETGEVKDQEVFMGDFPLMTEMGTFIINGAERVIVSQLVRSPGVYFNGKLDKNGKKGFGSTVIPNRGAWLEYETDAKDVVHVRIDRTRKLPVTVLLRALGFGSDQEIIDLIGDNDYLRNTLEKDNTDNAEKALLEIYERLRPGEPPTVDNARSLLVSRFFDPKRYDLASVGRYKINKKLHLKNRLFNQTLAETLVDPETGEIIASKGDILDRRNLDQIIPNLENGVGFRTLRPTDGVMEDSVLVQSIKIYAPNDEEKEINIIGNAYIEENVKHITPSDIISSISYFFNLLHGVGDTDDIDHLGNRRLRSVGELLQNQFRIGLSRMERVVRERMSIQDMTTITPQQLINIRPVVASIKEFFGSSQLSQFMDQTNPLGELTHKRRLSALGPGGLTRERAGYEVRDVHYSHYGRMCPIETPEGPNIGLINSLSSFAKVNKFGFIETPYRRVDPETNRVTDKIDYLTADEEDNYVVAQANSKLDEQGTFTEEEVMARFRSENLAVEKERIDYMDVSPKQVVSVATACIPFLENDDSNRALMGANMQRQAVPLMHPEAPFVGTGMEHVSAKDSGAAVTAKHDGIVEHVEAREIWVRRVSLVDGKEVTGGIDKYTLRKFVRSNQGTCYNQRPNVAEGDRVVKGEILGNGPSMDSGELALGRNVLVAFMTWDGYNYEDAIIMSERLVKDDVYTSIHIEEFESEARDTKLGPEEMTRDIPNVGEDALRDLDERGIIRVGAEVKDNDLLVGKVTPKGVTELTAEERLLHAIFGEKAREVRDTSLRVPHGGGGIVLDVKIFTREAGDELPPGVNQLVRVYIVQKRKIHEGDKMAGRHGNKGVISRILPEEDMPFMPDGTPVDIMLNPLGVPSRMNIGQVLELHLGMAARALGIHVATPVFDGANEEDVWSTVEEAGMARDAKTILYDGRSGEAFDNRISVGVMYMIKLAHMVDDKLHARSTGPYSLVTQQPLGGKAQFGGQRFGEMEVWALEAYGAAYTLQEILTIKSDDVVGRVKTYEAIVKGESVPEPGVPESFKVLIKELQSLGMDVKMLSADEEEIEMRDMDDDDFTNQNDAFNIVQPENAAAEKTE

SEQ ID NO: 50 - protein, 1184 aa, L. monocytogenes
MSGHSGHDVKYGRHRTRRSFARISEVLELPNLIEIQTASYQWFLDEGLREMFRDISPIEDFAGNLSLEFIDYDLGEPKYSVEESKNRDANYAAPLRVKLRLINKETGEVKDQEVFMGDFPLMTEMGTFIINGAERVIVSQLVRSPGVYFNGKLDKNGKKGFGSTVIPNRGAWLEYETDAKDVVHVRIDRTRKLPVTVLLRALGFGSDQEIIDLIGDNDYLRNTLEKDNTDNAEKALLEIYERLRPGEPPTVDNARSLLVSRFFDPKRYDLASVGRYKINKKLHLKNRLFNQTLAETLVDPETGEIIASKGDILDRRNLDQIIPNLENGVGFRTLRPTDGVMEDSVLVQSIKIYAPNDEEKEINIIGNAYIEENVKHITPSDIISSISYFFNLLHGVGDTDDIDHLGNRRLRSVGELLQNQFRIGLSRMERVVRERMSIQDMTTITPQQLINIRPVVASIKEFFGSSQLSQFMNQTNPLDELTYKRRLSALGPGGLTRERAGYEVRDVHYSHYGRMCPIETPEGPNIGLFNYLSSFAKVNKFGFIETPYRRVDPETNRVTDKIDYLTADEEDNYVVAQANSKLDEQGTFTEEEVMARFRSENLAVEKERIDYMDVSPKQVVSVATACIPFLENDDSNRALMGANMQRQAVPLMHPEAPFVGTGMEHVSAKDSGAAVTAKHDGIVEHVEAREIWVRRVSLVDGKEVTGGIDKYTLRKFVRSNQGTCYNQRPNVAEGDRVVKGEILGNGPSMDSGELALGRNVLVAFMTWDGYNYEDAIIMSERLVKDDVYTSIHIEEFESEARDTKLGPEEMTRDIPNVGEDALRDLDERGIIRVGAEVKDNDLLVGKVTPKGVTELTAEERLLHAIFGEKAREVRDTSLRVPHGGGGIVLDVKIFTREAGDELPPGVNQLVRVYIVQKRKIHEGDKMAGRHGNKGVISRILPEEDMPFMPDGTPVDIMLNPLGVPSRMNIGQVLELHLGMAARALGIHVATPVFDGANEEDVWSTVEEAGMARDAKTILYDGRSGEAFDNRISVGVMYMIKLAHMVDDKLHARSTGPYSLVTQQPLGGKAQFGGQRFGEMEVWALEAYGAAYTLQEILTIKSDDVVGRVKTYEAIVKGESVPEPGVPESFKVLIKELQSLGMDVKMLSADEEEIEMRDMDDDDFTNQNDAFNIVQPENAAAEKTE

SEQ ID NO: 51 - protein, 1184 aa, L. monocytogenes
MSGHSGHDVKYGRHRTRRSFARISEVLELPNLIEIQTASYQWFLDEGLREMFRDISPIEDFAGNLSLEFIDYDLGEPKYSVEESKNRDANYAAPLRVKLRLINKETGEVKDQEVFMGDFPLMTEMGTFIINGAERVIVSQLVRSPGVYFNGKLDKNGKKGFGSTVIPNRGAWLEYETDAKDVVHVRIDRTRKLPVTVLLRALGFGSDQEIIDLIGDNDYLRNTLEKDNTDNAEKALLEIYERLRPGEPPTVDNARSLLVSRFFDPKRYDLASVGRYKINKKLHLKNRLFNQTLAETLVDPETGEIIASKGDILDRRNLDQIIPNLENGVGFRTLRPTDGVMEDSVLVQSIKIYAPNDEEKEINIIGNAYIEENVKHITPSDIISSISYFFNLLHGVGDTDDIDHLGNRRLRSVGELLQNQFRIGLSRMERVVRERMSIQDMTTITPQQLINIRPVVASIKEFFGSSQLSQFMGQTNPLGELTLKRRLSALGPGGLTRERAGYEVRDVHYSHYGRMCPIETPEGPNIGLINSLSSFAKVNKFGFIETPYRRVDPETNRVTDKIDYLTADEEDNYVVAQANSKLDEQGTFTEEEVMARFRSENLAVEKERIDYMDVSPKQVVSVATACIPFLENDDSNRALMGANMQRQAVPLMHPEAPFVGTGMEHVSAKDSGAAVTAKHDGIVEHVEAREIWVRRVSLVDGKEVTGGIDKYTLRKFVRSNQGTCYNQRPNVAEGDRVVKGEILGNGPSMDSGELALGRNVLVAFMTWDGYNYEDAIIMSERLVKDDVYTSIHIEEFESEARDTKLGPEEMTRDIPNVGEDALRDLDERGIIRVGAEVKDNDLLVGKVTPKGVTELTAEERLLHAIFGEKAREVRDTSLRVPHGGGGIVLDVKIFTREAGDELPPGVNQLVRVYIVQKRKIHEGDKMAGRHGNKGVISRILPEEDMPFMPDGTPVDIMLNPLGVPSRMNIGQVLELHLGMAARALGIHVATPVFDGANEEDVWSTVEEAGMARDAKTILYDGRSGEAFDNRISVGVMYMIKLAHMVDDKLHARSTGPYSLVTQQPLGGKAQFGGQRFGEMEVWALEAYGAAYTLQEILTIKSDDVVGRVKTYEAIVKGESVPEPGVPESFKVLIKELQSLGMDVKMLSADEEEIEMRDMDDDDFTNQNDAFNIVQPENAAAEKTE

SEQ ID NO: 52 - protein, 1394 aa, N. meningitidis
MCMNYSFTEKKRIRKSFAKRENVLEVPFLLATQIDSYAKFLQLENAFDKRTDDGLQAAFNSIFPIVSHNGYARLEFVHYTLGEPLFDIPECQLRGITYAAPLRARIRLVILDKEASKPTVKEVRENEVYMGEIPLMTPSGSFVINGTERVIVSQLHRSPGVFFEHDKGKTHSSGKLLFSARIIPYRGSWLDFEFDPKDLLYFRIDRRRKMPVTILLKALGYNNEQILDIFYDKETFYLSSNGVQTDLVADRLKGETAKVDILDKEGNVLVAKGKRITAKNIRDITNAGLTRLDVEPESLLGKALAADLIDSETGEVLASANDEITEELLAKFDINGVKEITTLYINELDQGAYISNTLRTDETAGRQAARVAIYRMMRPGEPPTEEAVEQLFNRLFFSEDSYDLSRVGRMKFNTRTYEQKLSEAQQNSWYGRLLNETFAGAADKGGYVLSVEDIVASIATLVELRNGHGEVDDIDHLGNRRVRSVGELTENQFRSGLARVERAVKERLNQAESENLMPHDLINAKPVSAAIKEFFGSSQLSQFMDQTNPLSEVTHKRRVSALGPGGLTRERAGFEVRDVHPTHYGRVCPIETPEGPNIGLINSLSVYARTNDYGFLETPYRRVIDGKVTEEIDYLSAIEEGRYVIAQANADLDSDGNLIGDLVTCREKGETIMATPDRVQYMDVATGQVVSVAASLIPFLEHDDANRALMGANMQRQAVPCLRPEKPMVGTGIERSVAVDSATAIVARRGGVVEYVDANRVVIRVHDDEATAGEVGVDIYNLVKFTRSNQSTNINQRPAVKAGDVLQRGDLVADGASTDFGELALGQNMTIAFMPWNGYNYEDSILISEKVAADDRYTSIHIEELNVVARDTKLGAEDITRDIPNLSERMQNRLDESGIVYIGAEVEAGDVLVGKVTPKGETQLTPEEKLLRAIFGEKASDVKDTSLRMPTGMSGTVIDVQVFTREGIQRDKRAQSIIDSELKRYRLDLNDQLRIFDNDAFDRIERMIVGQKANGGPMKLAKGSEITTEYLAGLPSRHDWFDIRLTDEDLAKQLELIKVSLQQKREEADELYEIKKKKLTQGDELQPGVQKMVKVFIAIKRRLQAGDKMAGRHGNKGVVSRILPVEDMPYMADGRPVDIVLNPLGVPSRMNIGQILEVHLGWAAKGIGERIDRMLKEQRKAGELREFLNRLYNGSGKKEDLDALTDEEIIELASNLRKGASFASPVFDGAKESEIREMLNLAYPSDDPEVEKLGFNDSKTQITLYDGRSGEAFDRKVTVGVMHYLKLHHLVDEKMHARSTGPYSLVTQQPLGGKAQFGGQRFGEMEVWALEAYGAAYTLQEMLTVKSDDVNGRTKMYENIVKGEHKIDAGMPESFNVLVKEIRSLGLDIDLERY

SEQ ID NO: 53 - protein, 1394 aa, N. meningitidis
MCMNYSFTEKKRIRKSFAKRENVLEVPFLLATQIDSYAKFLQLENAFDKRTDDGLQAAFNSIFPIVSHNGYARLEFVHYTLGEPLFDIPECQLRGITYAAPLRARIRLVILDKEASKPTVKEVRENEVYMGEIPLMTPSGSFVINGTERVIVSQLHRSPGVFFEHDKGKTHSSGKLLFSARIIPYRGSWLDFEFDPKDLLYFRIDRRRKMPVTILLKALGYNNEQILDIFYDKETFYLSSNGVQTDLVADRLKGETAKVDILDKEGNVLVAKGKRITAKNIRDITNAGLTRLDVEPESLLGKALAADLIDSETGEVLASANDEITEELLAKFDINGVKEITTLYINELDQGAYISNTLRTDETAGRQAARVAIYRMMRPGEPPTEEAVEQLFNRLFFSEDSYDLSRVGRMKFNTRTYEQKLSEAQQNSWYGRLLNETFAGAADKGGYVLSVEDIVASIATLVELRNGHGEVDDIDHLGNRRVRSVGELTENQFRSGLARVERAVKERLNQAESENLMPHDLINAKPVSAAIKEFFGSSQLSQFMDQTNPLSEVTRKRRVFALGPGGLTRERAGFEVRDVHPTHYGRVCPIETPEGPNIGLINSLSVYARTNDYGFLETPYRRVIDGKVTEEIDYLSAIEEGRYVIAQANADLDSDGNLIGDLVTCREKGETIMATPDRVQYMDVATGQVVSVAASLIPFLEHDDANRALMGANMQRQAVPCLRPEKPMVGTGIERSVAVDSATAIVARRGGVVEYVDANRVVIRVHDDEATAGEVGVDIYNLVKFTRSNQSTNINQRPAVKAGDVLQRGDLVADGASTDFGELALGQNMTIAFMPWNGYNYEDSILISEKVAADDRYTSIHIEELNVVARDTKLGAEDITRDIPNLSERMQNRLDESGIVYIGAEVEAGDVLVGKVTPKGETQLTPEEKLLRAIFGEKASDVKDTSLRMPTGMSGTVIDVQVFTREGIQRDKRAQSIIDSELKRYRLDLNDQLRIFDNDAFDRIERMIVGQKANGGPMKLAKGSEITTEYLAGLPSRHDWFDIRLTDEDLAKQLELIKVSLQQKREEADELYEIKKKKLTQGDELQPGVQKMVKVFIAIKRRLQAGDKMAGRHGNKGVVSRILPVEDMPYMADGRPVDIVLNPLGVPSRMNIGQILEVHLGWAAKGIGERIDRMLKEQRKAGELREFLNRLYNGSGKKEDLDALTDEEIIELASNLRKGASFASPVFDGAKESEIREMLNLAYPSDDPEVEKLGFNDSKTQITLYDGRSGEAFDRKVTVGVMHYLKLHHLVDEKMHARSTGPYSLVTQQPLGGKAQFGGQRFGEMEVWALEAYGAAYTLQEMLTVKSDDVNGRTKMYENIVKGEHKIDAGMPESFNVLVKEIRSLGLDIDLERY

SEQ ID NO: 54 - protein, 1394 aa, N. meningitidis
MCMNYSFTEKKRIRKSFAKRENVLEVPFLLATQIDSYAKFLQLENAFDKRTDDGLQAAFNSIFPIVSHNGYARLEFVHYTLGEPLFDIPECQLRGITYAAPLRARIRLVILDKEASKPTVKEVRENEVYMGEIPLMTPSGSFVINGTERVIVSQLHRSPGVFFEHDKGKTHSSGKLLFSARIIPYRGSWLDFEFDPKDLLYFRIDRRRKMPVTILLKALGYNNEQILDIFYDKETFYLSSNGVQTDLVADRLKGETAKVDILDKEGNVLVAKGKRITAKNIRDITNAGLTRLDVEPESLLGKALAADLIDSETGEVLASANDEITEELLAKFDINGVKEITTLYINELDQGAYISNTLRTDETAGRQAARVAIYRMMRPGEPPTEEAVEQLFNRLFFSEDSYDLSRVGRMKFNTRTYEQKLSEAQQNSWYGRLLNETFAGAADKGGYVLSVEDIVASIATLVELRNGHGEVDDIDHLGNRRVRSVGELTENQFRSGLARVERAVKERLNQAESENLMPHDLINAKPVSAAIKEFFGSSQLSQFMDQTNPLSEVTYKRRVSALGPGGLTRERAGFEVRDVHPTHYGRVCPIETPEGPNIGLINSLSVYARTNDYGFLETPYRRVIDGKVTEEIDYLSAIEEGRYVIAQANADLDSDGNLIGDLVTCREKGETIMATPDRVQYMDVATGQVVSVAASLIPFLEHDDANRALMGANMQRQAVPCLRPEKPMVGTGIERSVAVDSATAIVARRGGVVEYVDANRVVIRVHDDEATAGEVGVDIYNLVKFTRSNQSTNINQRPAVKAGDVLQRGDLVADGASTDFGELALGQNMTIAFMPWNGYNYEDSILISEKVAADDRYTSIHIEELNVVARDTKLGAEDITRDIPNLSERMQNRLDESGIVYIGAEVEAGDVLVGKVTPKGETQLTPEEKLLRAIFGEKASDVKDTSLRMPTGMSGTVIDVQVFTREGIQRDKRAQSIIDSELKRYRLDLNDQLRIFDNDAFDRIERMIVGQKANGGPMKLAKGSEITTEYLAGLPSRHDWFDIRLTDEDLAKQLELIKVSLQQKREEADELYEIKKKKLTQGDELQPGVQKMVKVFIAIKRRLQAGDKMAGRHGNKGVVSRILPVEDMPYMADGRPVDIVLNPLGVPSRMNIGQILEVHLGWAAKGIGERIDRMLKEQRKAGELREFLNRLYNGSGKKEDLDALTDEEIIELASNLRKGASFASPVFDGAKESEIREMLNLAYPSDDPEVEKLGFNDSKTQITLYDGRSGEAFDRKVTVGVMHYLKLHHLVDEKMHARSTGPYSLVTQQPLGGKAQFGGQRFGEMEVWALEAYGAAYTLQEMLTVKSDDVNGRTKMYENIVKGEHKIDAGMPESFNVLVKEIRSLGLDIDLERY

SEQ ID NO: 55 - protein, 1394 aa, N. meningitidis
MCMNYSFTEKKRIRKSFAKRENVLEVPFLLATQIDSYAKFLQLENAFDKRTDDGLQAAFNSIFPIVSHNGYARLEFVHYTLGEPLFDIPECQLRGITYAAPLRARIRLVILDKEASKPTVKEVRENEVYMGEIPLMTPSGSFVINGTERVIVSQLHRSPGVFFEHDKGKTHSSGKLLFSARIIPYRGSWLDFEFDPKDLLYFRIDRRRKMPVTILLKALGYNNEQILDIFYDKETFYLSSNGVQTDLVADRLKGETAKVDILDKEGNVLVAKGKRITAKNIRDITNAGLTRLDVEPESLLGKALAADLIDSETGEVLASANDEITEELLAKFDINGVKEITTLYINELDQGAYISNTLRTDETAGRQAARVAIYRMMRPGEPPTEEAVEQLFNRLFFSEDSYDLSRVGRMKFNTRTYEQKLSEAQQNSWYGRLLNETFAGAADKGGYVLSVEDIVASIATLVELRNGHGEVDDIDHLGNRRVRSVGELTENQFRSGLARVERAVKERLNQAESENLMPHDLINAKPVSAAIKEFFGSSQLSQFMDQTNPLSEVTNKRRVSALGPGGLTRERAGFEVRDVHPTHYGRVCPIETPEGPNIGLINSLSVYARTNDYGFLETPYRRVIDGKVTEEIDYLSAIEEGRYVIAQANADLDSDGNLIGDLVTCREKGETIMATPDRVQYMDVATGQVVSVAASLIPFLEHDDANRALMGANMQRQAVPCLRPEKPMVGTGIERSVAVDSATAIVARRGGVVEYVDANRVVIRVHDDEATAGEVGVDIYNLVKFTRSNQSTNINQRPAVKAGDVLQRGDLVADGASTDFGELALGQNMTIAFMPWNGYNYEDSILISEKVAADDRYTSIHIEELNVVARDTKLGAEDITRDIPNLSERMQNRLDESGIVYIGAEVEAGDVLVGKVTPKGETQLTPEEKLLRAIFGEKASDVKDTSLRMPTGMSGTVIDVQVFTREGIQRDKRAQSIIDSELKRYRLDLNDQLRIFDNDAFDRIERMIVGQKANGGPMKLAKGSEITTEYLAGLPSRHDWFDIRLTDEDLAKQLELIKVSLQQKREEADELYEIKKKKLTQGDELQPGVQKMVKVFIAIKRRLQAGDKMAGRHGNKGVVSRILPVEDMPYMADGRPVDIVLNPLGVPSRMNIGQILEVHLGWAAKGIGERIDRMLKEQRKAGELREFLNRLYNGSGKKEDLDALTDEEIIELASNLRKGASFASPVFDGAKESEIREMLNLAYPSDDPEVEKLGFNDSKTQITLYDGRSGEAFDRKVTVGVMHYLKLHHLVDEKMHARSTGPYSLVTQQPLGGKAQFGGQRFGEMEVWALEAYGAAYTLQEMLTVKSDDVNGRTKMYENIVKGEHKIDAGMPESFNVLVKEIRSLGLDIDLERY
